United States Patent Application Publication US 2014/0086976 A1 - sequence listing, part 2

SEQ ID NO: 21 - DNA, 201444 bp, Artificial Sequence
  GLV-1h190
ttatgagaccatcaaagagagaaagagaataaaaatatttttgtaaaactttttttatgagaccatcaaagagagaaagagaataaaaatatttttgtaaaacttttttatgagaccatcaaagagagaaagagaataaaaatatttttgtaaaacttttttatgagaccatcaaagagagaaagagaataaaaatatttttgtaaaactttttttatgagaccatcaaagagagaaagagaataaaaatatttttgtaaaactttttttatgagaccatcaaagagagaaagagaataaaaatatttttgtaaaactttttttatgagaccatcaaagagagaaagagaataaaaatatttttgtaaaactttttttatgagaccatcaaagagagaaagagaataaaaatatttttgtaaaactttttttatgagaccatcaaagagagaaagagaataaaaatatttttgtaaaactttttttatgagaccatcaaagagagaaagagaataaaaatatttttgtaaaactttttttatgagaccatcaaagagagaaagagaataaaaatatttttgtaaaactttttttatgagaccatcaaagagagaaagagaataaaaatatttttgtaaaactttttttatgagaccatcaaagagagaaagagaataaaaatatttttgtaaaactttttttatgagaccatcaaagagagaaagagaataaaaatatttttgtaaaactttttttatgagaccatcaaagagagaaagagaataaaaatatttttgtaaaactttttttatgagaccatcagaaagaggtttaatatttttgtgatactctgaaaggaaataggaataggaataggaatagtgtcataatcgtatcacactattgagacagaaaaagaagaagtcgcgagaggtaactttttgtgaatgtagttaagaacatttttgttttgcaaaccggaatatagtgtccggtacacttttttaattcgtggtgtgcctgaatcgttcgattaaccctactcatccaatttcagatgaatagagttatcgattcagacacacgctttgagttttgttgaatcgatgagtgaagtatcatcggttgcaccttcagatgccgatccgtcgacatacttgaatccatccttgacctcaagttcagatgattccttgcacatgtctccgatacgaacgctaaactctagattcttgacgcattttgtatcgacgatcgttgaaccgatgatatcttcgtaactcactttcttatgagagatgttagacccgagtactggatgggtcttgatgtcgctgtctttctcttcttcgctacatctgatgtcgatagacacttcacagtctttgatcatagcaagagcttcttcatgagtgatcgcgggagagtccttaccttgtcctggggacacgctggacaatctagcattcactgtgtttccatcagcggattctgagatggatttaatctgaggacatttggtgaatccaaagttcattctcagacctccaccgatgatggagtaataagtggtaggaggatctacatcctcgactgatgtggaatcatcttctgattccacctcgggatctggatctgactcggactctgtaatttccgttacggattggcaaatcttatcattggtcggtgtttggtcttgctttgtgactttgataataacatcgattcccatatgatgtttgttttcttcttccgtacacgaggaggaggatgaggatgattgctgaagactggcaggcatagcagctgccgccaggcacatgcatgccaggacgatatattgtttcataattgctattgattgagtactgttctttatgattctacttccttaccgtgcaataaattagaatatattttctacttttacgagaaattaattattgtatttattatttatgggtgaaaaacttactataaaaagtgggtgggtttggaattagtgatcagtttatgtatatcgcaactaccgggcatatggctatcgacatcgagaacattacccacatgataagagattgtatcagtttcgtagtcttgagtattggtattactatatagtatatagatgtcgcccactagagttactgtctccgaatgcggcatgatagtatcattctttgctttcgttaactgtttggaggaagaatctttgttattgcatttaatctcgaaattcagagtgcacacctttctcctgtaaagaaacctgaagtcgctaccttattaagaacggagaagtatccatcacgaaatacgggattacagtctttatgattcatagtaatagttagttccgacgttgagatggattcgctgagaccggtagtggtcgtccgagtacacgacgtgtcgttaactggatacaggttaatttccacatcgatatagttaaacgtatttctgggtacgggttcgcatttatctgcggaagagacggtgtgagaatatgttccgagaccacacggagaacagatgacgtctccggatactccgtatcctattccacattttgtttgggaaacacatgccttgcatccggatgatcctttgagaagacaataatatccgggagagcattcacagattctattgtgagtcgtgttacacgatcgcgtcttccgttacaacttagacaagcgggtaaatgattattgcgagatgtgaaggtacccgaaccacacggcgtacatcgtgtgttagtcttgctatcgcataatctggaagcgtatgttcccggacacaaattatggcgtttgtattcgttgtctttacactttccatcggatggtgcatgcggtgctatatctcttccgtttattattatacatgagagaaacaatatatacgagtataatacggacttcatgatttaataatgtagtaatcgttgtcttgttcctgtttcctacttctccaatcatatagatattttctttctatcatggataatatttgtaatggttctttccgtacaacatactgtttagatgatattgcgcataatttccggaggcaaatacgatagtctagattgaccgatggtagactctaatttattgagtgctttgtcgacgagtttacttttacgctccatcgatagatggcactgttctatgagatcgtcgtacatgggaaatgaaatgtgactgtctgaatgtatggctttaagatagctgtgataccgtatacaggtcggtgtcggagattcgaatctctttgaggcgacttatgtcacgatgatggaatctatcttatcgaatgatatatttttcataaatacacttttatagtcctcgtttaaacagaatttactatgtagttccgcgaatgactcgtcccttaataggcagtaggctagtatcttttttacgtagtaatcgtcgtagggagagacatcttgtagaacaacgatttcgttttgttttctcttctgtaactgcttttctggatggccgtattgattatcgagcgtgatactcgctccatattccaataaccgctttgcaaattgtatattattgacatcgaccgcgtaatatagtagagttatcgatcatatctatatcatccatgtacttgcttagtatatcaaatacatctatcagtatggtttcataacagtgatacccgcaattattaaatctcgataatatcagaccgtacatacatagacggccattgttcgatacgtgatttacagccgcgtgtccatattttccacgataaaccttacgacgtttacatcgacgagattattattaacaaagtagtcgtgtagaggatagttgttgtccgttatctaacatgcatcgaacgaccatatcgccgtaatgtaagtagtttatcagtatggcttgtacgatggattcatcctgttgtctaaatctctttagaatgttatcgatgatgtagtggttatattctctggaatcgtacgaagtaatactacgcattacgtcgacaagagtatgacgtctctcaataagaagattaacgatttccatgtctacattatatggggttactctaaatcgcttgtttagataatacgcctctaatatagggctgacgtcgtatactctacacgtgtccacatcctttattaataataatttaacaatctctatatctatggttgagaaagaccagtagtattggatgggtaaagatcctccttcgtctctgccatggatggaaacattgttatcgatcaaacatttaattacatccttggatagagattgagattctctatgagacgatatatagtaatgaagagagttcttacacatatcactgtcgtacatacaggtacgaaatacgtaaccggtgctgtaacattctgatttaagaagccatagcaatacttctggtctcggattaggcgtcgttacgtatatatccaccaatccgagaccattgattgcataattcgtattcttggacggacgtatccgtttatccacaattaggtattttagcagacgtaagtcgatattatccgaatacagatcgaaatcatttatattcgacttgagttcgttagaggaatttgaatagctggatatcagtagatgcacaatctgagattttacgtatctatgcttactgtatactcctagcggagttaatccttcgttgtttctacaaagtctctcgactccgcgagagaacaatcttaatgtctgtatcgcatttattggagacgtaacaatgtagcgcattgtttcctcgtctatctatatgttttgataagttgtgacacgtttcaatttctagttttatttttttgtacgtcacatcttcatccagtagacgacatagaatagtgcactctctaccacaataatccatagctattctggtgctaattattcctatttcacgaaggcaatcattcctcataagatgataaaaagtgtagtggagatttagtatttagcagtgcggatatgatccaagagggtgagatagtcgttctcgttcagaatctttcgcagcataagtagtatgtcgatatacttatcgttgaagactctttataaaagtctatttgtttatatttattgcggatagcagtatttccctataaaaagtatacgtcctgtggtgtctttaatcatgtacatgaatggatggtttatgtagaccttcgtacgatataccatcgaaaagttaatcgtaaatactcctgtaacggccgatgcttctgtatactcctcattaacatctataaacgtcgtatgtagaaatttttctacagtgatagtttcattacacatcttgctaaaatctgcataatatccgaatatattagtaagtcctaaattttctaaaatcggtaccagattatacggttctgtcatttccactttaaactttggcatatacaagtctatacttttagtagataacataccacaccattttttaaatttttcatctgttatatttttttctatgttatatataccttctatgtcgtccggtagtataattaccatactagagtttccctcgtatggaatatcgataatagagaatcctccgaataattcattaatatgtacatattgcaagttattctcggtacccaccatcatatcaacgctggtaactatattcttagaaatataaaacttgtctgtatatgtaagatgtttagaaaatggatatttccacattgctttaaaatggacggcgctaacaactgtcatacgagtattaatggatagcggactagtcaataaggaattaattttaccatttgtcattgtcttaacccattcgttgattagttcctttgtttggttagcattattaaagtttacagtttgaaaatcgtcttttattttttgtaggaaggaggcgtggaactcgatactatcgctaccgtatattttatttgcggtagctagtgtcgcacaatacggaatatctacctccatgtcatcattattgtcatcgggtgtattctcattcatattctctatatattttgatagttgttcagctgtagaaccagctgctccatgatttagaatagataaagtagataaaatggaaactggagaaatcaaaacattttcatcagggtgttttaagattagttctttaaagatatccatggtatagacctaacgataacgatatatatcataaataaataatgttaaatttcaatttatgtttgtaccccgtattcatacttaacaaattggtattgcgtacacaatcaatcatattacataccattaataatgcaagcataaaaaattgttagtagatgtttctaaatataggttccgtaagcaaagaatataagaatgaagcggtaatgataaaatcaatcgttatctaaaatgatcatactcatttattttattctattatattaacacatacatttttaacagcaacacattcaatattgtattgttatttttatattatttacacaattaacaatatattattagtttatattactgaattaataatataaaattcccaatcttgtcataaacacacactgagaaacagcataaacacagaatccatcaaaaatgttgataaattatctgatgttgttgttcgctgctatgataatcagatcattcgccgatagtggtaacgctatcgaaacgacattgccagaaattacaaacgctacaacagatattccagctatcagattatgcggtccagagggagatggatattgtttacacggtgactgtatccacgctagagatattgacggtatgtattgtagatgctctcatggttatacaggcattagatgtcagcatgtagtattagtagactatcaacgttcagaaaacccaaacactacaacgtcatatatcccatctcccggtattatgcttgtattagtaggcattattatgtgttgtctattatctgtttataggttcactcgacgaactaaactacctatacaagatatggttgtgccataatttttataaatttttttatgagtatttttacaaaaatgtataaagtgtatgtcttatgtatatttataaaaatgctaagtatgcgatgtatctatgttatttgtatttatctaaacaatacctctacctctagatattatacaaaaattttttatttcggcatattaaagtaaaatctagttaccttgaaaatgaatacagtgggtggttccgtatcaccagtaagaacataatagtcaaatacagtatccgattgagattttgcatacaatactagtctagaaagaaatttgtaatcatcttctgtgacgggagtccatatatctgtatcatcgtctagtttatcagtgtcccatgctatattcctgttatcatcattagttaatgaaaataactctcgtgcttcagaaaagtcaaatattgtatccatacatacatctccaaaactatcgcttatacgtttatctttaacgatacctatacctagatggttatttactaacagacattttccagatctattgactataactcctatagtttccacatcaaccaagtaatgatcatctattgttatataacaataacataactcttttccatttttatcagtatgtatatctatatcaacgtcgtcgttgtagtgaatagtagtcattgatctattatatgaaacggatatgtctagaacggcaattgttttacgtccagttaacactttcgttgatttaaagtctagagtctttgcaaacataatatccttatccgactttatatttcctgtagggtggtataattttattttgcctccacatatcggtgtttccaaatatattactagacaatattccatatagttattagttaagggtacccaattagaacacgtacgcttattatcatcatttggatcgtatttcataaaagttattgtgttatcgatgtcaacacattctacattttttaatcgtctatatagtatttttctgatattttctataatatcagaattgtcttccatcggaagttgtatactatcggaatcagttacatgtttaaataattctctgatgtcattccttatacaatcaaattcattattaaacagtttaatagtctgtagacctttatcgtcgtaaatatccattgtcttattagttacgcttatttttatgtgtttttacgttgctttattatattttataagaatgattgtttgacgaatcacgagaactattaagacacattattaggtatatattataaaaaagtttttgattacgatgttataagaggaaagaggacacattaacatcatacatcaattaactacattcttataacatcgtaatcaaaagaattgcaattttgatgtataacaactgtcaatgggttatggaattgtatattacatattatacggtatgttggtaacgacaaataccggtcggtaattgtctgccggtgtaatagaattatatatatctatctattacaccggccttgtatacataataataagttgtggtagtatgatctccatatttataatttaggactttgtattcagtatttttggaatcataaaaaataaaaaaaagttttactaatttaaaatttaaaaagtatttacatttttttcactgtttagtcgcggatatggaattcgatcctgccaaaatcaatacatcatctatagatcatgtaacaatattacaatacatagatgaaccaaatgatataagactaacagtatgcattatccgaaatattatatcaatatcacaaaaataaatacacatttggctaatcaatttcgggcttggaaaaaacgtatcgccggaagggactatatgactaacttatctagagatacaggaatacaacaatcaaaacttactgaaactatacgtaactgtcaaaaaaatagaaacatatatggtctatatatacactacaatttagttattaattggataaccgatgtgattatcaatcaatattaagagggttggtaaattggtacatagctaataatacctatactccaaatacacccaataatacaacaaccatttctgagttggatatcatcaaaatactaaataaatacgaggacgtgtatagagtaagtaaagaaaaagaatgtggaatttgctatgaagttgtttactcaaaacgatagatactttggtttattggattcgtgtactcatatattttgcataacatgcatcaatatatggcatagaacacgaagagaaaccggtgcgtcggataattgtcctatatgccgtacccgttttagaaacataacaatgagcaagttctataagctagttaactaataaataaaaagtttaatttgttgacgacgtatgtcgttattttttctcgtataaaagattaatttgattctaatataatctttagtattggataaatatcaattcaaattaattccattagattatatcataaataaaaatagtagcacacaactacttcagcaaacattctttttataaatgccatctagcgtagcgaggacacaagtgaacctataattatcaaatttattagtatcagtcacatgaaggactttacgtagagtgacgattccactatctgtggtacgaacggtttcatcttctttgatgccatcacccagatgttctataaacttggtatcctcgtccgatttcatatcctttgccaaccaatacatatagctaaactcaggcatatgttccacacatcctgaacaatgaaattctccagaagatgttacaatgtctagatttggacatttggtttcaaccgcgttaacatatgagtgaacacacccatacatgaaagcgatgagaaataggattctcatcttgccaaaatatcactagaaaaaatttatttatcagttttaaaggtataaaaaatacttattgttgctcgaatattttgtatttgatggtatacggaagattagaaatgtaggtattatcatcaactgattctatggttttatgtattctatcatgtttcactattgcgttggaaataatatcatatgcttccacatatattttattttgttttaactcataatactcacgtaattctggattattggcatatctatgaataattttagctccatgatcagtaaatattaatgagaacatagtattaccacctaccattatttttttcatctcattcaattcttaattgcaaagatctatataatcattatagcgttgacttatggactctggaatcttagacgatgtacagtcatctataatcatggcatatttaatacattgttttatagcatagtcgttatctacgatgttagatatttctctcaatgaatcaatcacacaatctaatgtaggtttatgacataatagcattttcagcagttcaatgtttttagattcgttgatggcaatggctatacatgtatatccgttatttgatctaatgttgacatctgaaccggattctagcagtaaagatactagagattgtttattatatctaacagccttgtgaagaagtgtttctcctcgtttgtcaatcatgttaatgtctttaagataaggtaggcaaatgtttatagtactaagaattgggcaagcataagacatgtcacaaagacccttttttgtatgtataagtgtaaaaattataacatccatagttggatttacataggtgtccaatcgggatctctccatcatcgagataattgatggcatctcccttccttttttagtagatatttcatcgtgtaagaatcaatattaatatttctaaagtatccgtgtatagcctctttatttaccacagctccatattccactagagggatatcgccgaatgtcatatactcaattagtatatgttggaggacatccgagttcattgttttcaatatcaaagagatggtttccttatcatttctccatagtggtacaatactacacattattccgtgcggctttccattttccaaaaacaatttgaccaaatctaaatctacatctttattgtatctataatcactatttagataatcagccataattcctcgagtgcaacatgttagatcgtctatatatgaataagcagtgttatctattcctttcattaacaatttaacgatgtctatatctatatgagatgacttaatataatattgaagagctgtacaatagtttttatctataaaagacggcttgattccgtgattaattagacatttaacaacttccggacgcacatatgctctcgtatccgactctgaatacagatgagagatgatatacagatgcaatacggtaccgcaatttcgtagttgataatcatcatacgcgtatcagtactcgtcctcataaagaacactgcagccattttctatgaacaaatcaataattttagaaacaggatcattgtcattacataattttctataactgaacgatggttttcacatttaacactcaagtcaaatccatgttctaccaacacctttatcaagtcaacgtctacatttttggatttcatatagctgaatatattaaagttatttatgttgctaaatccagtggcttctagtagagccatcgctatatccttattaactttaacatgtctactatttgtgtattcttctaatggggtaagctgtctccaatttttgcgtaatggattagtgccactgtctagtagtagtttgacgacctcgacattattacaatgctcattaaaaaggtatgcgtgtaaagcattattcttgaattggttcctggtatcattaggatctctgtctttcaacatctgtttaagttcatcaagagccacctcctcattttccaaatagtcaaacattttgactgaatgagctactgtgaactctatacacccacacaactaatgtcattaaatatcatgtcaaaaacttgtacaattattaataaaaataatttagtgtttaaattttaccagttccagattttacacctccgttaatacctccattaaccccactggacgatcctcctccccacattccaccgccaccagatgtataagttttagatcctttattactaccatcatgtccatggataaagacactccacatgccgccactaccccctttagaagacatattaataagacttaaggacaagtttaacaataaaattaatcacgagtaccctactaccaacctacactattatatgattatagtttctatttttacagtaccttgactaaagtttctagtcacaagagcaatactaccaacctacactattatatgattatagtttctatttttataggaacgcgtacgagaaaatcaaatgtctaatttctaacggtagtgttgataaacgattgttatccgcggatacctcctctatcatgtcgtctattttcttactttgttctattaacttattagcattatatattatttgattataaaacttatattgcttattagcccaatctgtaaatatcggattattaacatatcgtttctttgtaggtttatttaacatgtacatcactgtaagcatgtccttaccatttattttaatttgacgcatatccgcaatttctttttcgcagtcggttataaattctatatatgatggatacatgctacatgtgtacttataatcgactaatatgaagtacttgatacatattttcagtaacgatttattattaccacctatgaataagtacctgtgatcgtctaggtaatcaactgttttcttaatacattcgatggttggtaatttactcagaataatttccaatatcttaatatataattctgctatttctgggatatatttatctgccagtataacacaaatagtaatacatgtaaacccatattttgttattatattaatgtctgcgccattatctattaaccattctactaggctgacactatgcgactcaatacaatgataaagtatactacatccatgtttatctattttgtttatatcatcaatatacggcttacaaagttttagtatcgataacacatccaactcacgcatagagaaggtagggaataatggcataatatttattaggttatcatcattgtcattatctacaactaagtttccattttttaaaatatactcgacaactttaggatctctattgccaaatttttgaaaatatttatttatatgcttaaatctatataatgtagctccttcatcaatcatacatttaataacattgatgtatactgtatgataagatacatattctaacaatagatcttgtatagaatctgtatatcttttaagaattgtggatattaggatattattacataaactattacacaattctaaaatataaaacgtatcacggtcgaataatagttgatcaactatataattatcgattttgtgatttttcttcctaaactgtttacgtaaatagttagatagaatattcattagttcatgaccactatagttactatcgaataacgcgtcaaatatttcccgtttaatatcgcatttgtcaagataataatagagtgtggtatgttcacgataagtataataacgcatctctttttcgtgtgaaattaaatagtttattacgtccaaagatgtagcataaccatcttgtgacctagtaataatataataatagagaactgttttacccattctatcatcataatcagtggtgtagtcgtaatcgtaatcgtctaattcatcatcccaattataatattcaccagcacgtctaatctgttctattttgatcttgtatccatactgtatgttgctacatgtaggtattcctttatccaataatagtttaaacacatctacattgggatttgatgttgtagcgtatttttctacaatattaataccatttttgatactatttatttctatacctttcgaaattagtaatttcaataagtctatattgatgttatcagaacatagatattcgaatatatcaaaatcattgatatttttatagtcgactgacgacaataacaaaatcacaacatcgtttttgatattattatttttcttggtaacgtatgcctttaatggagtttcaccatcatactcatataatggatttgcaccactttctatcaatgattgtgcactgctggcatcgatgttaaatgttttacaactatcatagagtatcttatcgttaaccatgattggttgttgatgctatcgcattttttggtttctttcatttcagttatgtatggatttagcacgtttgggaagcatgagctcatatgatttcagtactgtagtgtcagtactattagtttcaataagatcaatctctagatctatagaatcaaaacacgataggtcagaagataatgaatatctgtaggcttcttgttgtactgtaacttctggttttgttagatggttgcatcgtgctttaacgtcaatggtacaaattttatcctcgctttgtgtatcatattcgtccctactataaaattgtatattcagattatcatgcgatgtgtatacgctaacggtatcaataaacggagcacaccatttagtcataaccgtaatccaaaaatttttaaagtatatcttaacgaaagaagttgtgtcattgtctacggtgtatggtactagatcctcataagtgtatatatctagagtaatgtttaatttattaaatggttgataatatggatcctcgtgacaatttccgaagatggaaataagacataaacacgcaataaatctaattgcggacatggttactccttaaaaaaatacgaataatcaccttggctatttagtaagtgtcatttaacactatactcatattaatccatggactcataatctctatacgggattaacggatgttctatatacggggatgagtagttctcttctttaactttatactttttactaatcatatttagactgatgtatgggtaatagtgtttgaagagctcgttctcatcatcagaataaatcaatatctctgtttttttgttatacagatgtattacagcctcatatattacgtaatagaacgtgtcatctaccttattaactttcaccgcatagttgtttgcaaatacggttaatcctttgacctcgtcgatttccgaccaatctgggcgtataatgaatctaaactttaattgcttgtaatcattcgaaataatttttagtttgcatccgtagttatcccctttatgtaactgtaaatttctcaacgcgatatctccattaataatgatgtcgaattcgtgctgtatacccatactgaatggatgaacgaataccgacggcgttaatagtaatttactttttcatctttacatattgggtactagttttactatcataagtttataaattccacaagctactatggaataagccaaccatcttagtataccacacatgtcttaaagtttattaattaattacatgttgttttatatatatcgctacgaatttaaagagaaattagtttaggaagaaaaattatctatctacatcatcacgtctctgtattctacgatagagtgctactttaagatgcgacagatccgtgtcatcaaatatatactccattaaaatgattattccggcagcgaacttgatattggatatatcacaacctttgttaatatctacgacaatagacagcagtcccatggttccataaacagtgagtttatctttctttgaagagatattttgtagagatcttataaaactgtcgaatgacatcgcatttatatctttagctaaatcgtatatgttaccatcgtaatatctaaccgcgtctatcttaaacgtttccatcgctttaaagacgtttccgatagatggtctcatttcatcagtcatactgagccaacaaatataatcgtgtataacatctttgatagaatcagactctaaagaaaacgaatcggctttattatacgcattcatgataaacttaatgaaaaatgtttttcgttgtttaagttggatgaatagtatgtcttaataattgttattatttcattaattaatatttagtaacgagtacactctataaaaacgagaatgacataactaatcataactagttatcaaagtgtctaggacgcgtaattttcatatggtatagatcctgtaagcattgtctgtattctggagctattttctctatcgcattagtgagttcagaatatgttataaatttaaatcgaataacgaacataactttagtaaagtcgtctatattaactcttttattttctagccatcgtaataccatgtttaagatagtatattctctagttactacgatctcatcgttgtctagaatatcacatactgaatctacatccaattttagaaattggtctgtgttacatatctcttctatattattgttgatgtattgtcgtagaaaactattacgtagaccattttctttataaaacgaatatatagtactccaattatctttaccgatatatttgcacacataatccattctctcaatcactacatctttaagattttcgttgttaagatatttggctaaactatataattctattagatcatcaacagaatcagtatatatttttctagatccaaagacgaactctttggcgtcctctataatattcccagaaaagatattttcgtgttttagtttatcgagatctgatctgttcatatacgccatgattgtacggtacgttatgataaccgcataaaataaaaatccattttcatttttaaccaatactattcataattgagattgatgtaatactttgttactttgaacgtaaagacagtacacggatccgtatctccaacaagcacgtagtaatcaaatttggtgttgttaaacttcgcaatattcatcaatttagatagaaacttatactcatcatctgttttaggaatccatgtattattaccactttccaacttatcattatcccaggctatgtttcgtccatcatcgttgcgcagagtgaataattcttttgtattcggtagttcaaatatatgatccatgcatagatcggcaaagctattgtagatgtgatttttcctaaatctaatataaaactcgtttactagcaaacactttcctgatttatcgaccaagacacatatggtttctaaatctatcaagtggtggggatccatagttatgacgcagtaacatatattattacattcttgactgtcgctaatatctaaatatttattgttatcgtattggattctgcatatagatggcttgtatgtcaaagatatagaacacataaccaatttatagtcgcgctttacattctcgaatctaaagttaagagatttagaaaacattatatcctcggatgatgttatcactgtttctggagtaggatatattaaagtctttacagatttcgtccgattcaaataaatcactaaataatatcccacattatcatctgttagagtagtatcattaaatctattatattttatgaaagatatatcactgctcacctctatatttcgtacatttttaaactgtttgtataatatctctctgatacaatcagatatatctattgtgtcggtagacgataccgttacatttgaattaatggtgttccattttacaacttttaacaagttgaccaattcatttctaatagtatcaaactctccatgattaaatattttaatagtatccattttatatcactacggacacaaagtagctgacataaaccattgtataatttttatgttttatgtttattagcgtacacattttggaagttccggcttccatgtatttcctggagagcaagtagatgatgaggaaccagatagtttatatccgtacttgcacttaaagtctacattgtcgttgtatgagtatgatcttttaaacccgctagacaagtatccgtttgatattgtaggatgtggacatttaacaatctgacacgtgggtggatcggaccattctcctcctgaacacaggacactagagttaccaatcaacgaatatccactattgcaactataagttacaacgctcccatcggtataaaaatcctcgtatccgttatgtcttccgttggatatagatggaggggattggcatttaacagattcacaaataggtgcctcgggattccataccatagatccagtagatcctaattcacaatacgatttagattcaccgatcaactgatatccgctattacaagagtacgttatactagagccaaagtctactccaccaatatcaagttggccattatcgatatctcgaggcgatgggcatctccgtttaatacattgattaaagagtgtccatccagtacctgtacatttagcatatataggtcccattttttgctttctgtatccaggtagacatagatattctatagtgtctcctatgttgtaattagcattagcatcagtctccacactattcttaaatttcatattaatgggtcgtgacggaatagtacagcatgatagaacgcatcctattcccaacaatgtcaggaacgtcacgctctccaccttcatatttatttatccgtaaaaatgttatcctggacatcgtacaaataataaaaagcccatatatgttcgctattgtagaaattgtttttcacagttgctcaaaaacgatggcagtgacttatgagttacgttacactttggagtctcatctttagtaaacatatcataatattcgatattacgagttgacatatcgaacaaattccaagtatttgattttggataatattcgtattttgcatctgctataattaagatataatcaccgcaagaacacacgaacatctttcctacatggttaaagtacatgtacaattctatccatttgtcttccttaactatatatttgtatagataattacgagtctcgtgagtaattccagtaattacatagatgtcgccgtcgtactctacagcataaactatactatgatgtctaggcatgggagacttttttatccaacgatttttagtgaaacattccacatcgtttaatactacatatttctcatacgtggtataaactccacccattacatatatatcatcgtttacgaataccgacgcgcctgaatatctaggagtaattaagtttggaagtcttatccatttcgaagtgccgtgtttcaaatattctgccacacccgttgaaatagaaaattctaatcctcctattacatataactttccatcgttaacacaagtactaacttctgattttaacgacgacatattagtaaccgttttccattttttcgttttaagatctacccgcgatacggaataaacatgtctattgttaatcatgccgccaataatgtatagacaattatgtaaaacatttgcattatagaattgtctatctgtattaccgactatcgtccaatattctgttctaggagagtaatgggttattgtggatatataatcagagtttttaatgactactatattatgttttataccatttcgtgtcactggctttgtagatttggatatagttaatcccaacaatgatatagcattgcgcatagtattagtcataaacttgggatgtaaaatgttgatgatatctacatcgtttggatttttatgtatccactttaataatatcatagctgtaacatcctcatgatttacgttaacgtcttcgtgggataagatagttgtcagttcatcctttgataattttccaaattctggatcggatgtcaccgcagtaatattgttgattatttctgacatcgacgcattatatagttttttaattccatatcttttagaaaagttaaacatccttatacaatttgtgaaattaatattatgaatcatagtttttacacatagatctactacaggcggaacatcaattattatggcagcaactagtatcatttctacattgtttatggtgatgtttatcttcttccagcgcatatagtctaatagcgattcaaacgcgtgatagtttataccattcaatataatcgcttcatcctttagatggtgatcctgaatgcgtttaaaaaaattatacggagacgccgtaataatttccttattcacttgtataatttccccattgatagaaaatattacgctttccattcttaaagtactataagtaattatagtataatgtaaacgtttatatattcaatatttttataaaaatcattttgacattaattcctttttaaatttccgtctatcatctatagaaacgtattctatgaatttataaaatgcttttacgtgtcctatcgtaggcgatagaaccgctaaaaagcctatcgaatttctacaaaagaatctgttatatggtatagggagagtataaaacattaaatgtccgtacttattaaagtattcagtagccaatcctaactctttcgaatacttattaatggctcttgttctgtacgaatctatttttttgaacaacggacctagtggtatatcttgttctatgtatctaaaataatgtctgactagatccgttagtttaatatccgcagtcatcttgtctagaatggcaaatctaactgcgggtttaggctttagtttagtttctatatctacatctatgtctttatctaacaccaaaaatataatagctaatattttattacaatcatccggatattcttctacgatctcactaactaatgtttctttggttatactagtatagtcactatcggacaaataaagaaaatcagatgatcgatgaataatacatttaaattcatcatctgtaagatttttgagatgtctcattagaatattattagggttagtactcattatcattcggcagctattacttattttattatttttcaccatatagatcaatcattagatcatcaaaatatgtttcaatcatcctaaagagtatggtgaatgactcttcccatctaatttctgaacgttcaccaatgtctctagccactttggcactaatagcgatcattcgcttagcgtcttctatattattaactggttgatttaatctatctagcaatggaccgtcggacagcgtcattctcatgttcttaatcaatgtacatacatcgccgtcatctaccaattcatccaacaacataagctttttaaaatcatcattataataggtttgatcgttgtcatttctccaaagaatatatctaataagtagagtcctcatgcttagttaacaactattttttatgttaaatcaattagtacaccgctatgtttaatacttattcatattttagtttttaggattgagaatcaatacaaaaattaatgcatcattaattttagaaatacttagtttccacgtagtcaatgaaacatttgaactcatcgtacaggacgttctcgtacaggacgtaactataaaccggtttatatttgttcaagatagatacaaatccgataactttttttacgaattctacgggatccactttaaaagtgtcataccgggttctttttatttttttaaacagatcaatggtgtgatgttgattaggtcttttacgaatttgatatagaatagcgtttacatattctccataatggtcaatcgccatttgttcgtatgtcataaattctttaattatatgacactgtgtattatttagttcatccttgttcattgttaggaatctatccaaaatggcaattatactagaactataggtgcgttgtatacacatattgatgtgtctgtttatacaatccatgatatttggatccatgctactaccttcgggtaaaattgtagcatcatataccatttctagtactttaggttcattattatccattgcagaggacgtcatgatcgaatcataaaaaaatatattatttttatgttattttgttaaaaataatcatcgaatacttcgtaagatactccttcatgaacataatcagttacaaaacgtttatatgaagtaaagtatctacgatttttacaaaagtccggatgcataagtacaaagtacgcgataaacggaataataatagatttatctagtctatctttttctatagctttcatagttagatacatggtctcagaagtaggattatgtaacatcagcttcgataaaatgactgggttatttagtcttacacattcgctcatacatgtatgaccgttaactacagagtctacactaaaatgattgaacaatagatagtctaccattgtttcgtattcagatagtacagcgtagtacatggcatcttcacaaattatatcattgtctaatagatatttgacgcatcttatggatcccacttcaacagccatcttaaaatcatattgctttcctttatcattaataatttctagaacatcatctctatcataaaagatacaaatattaactgtttgatccgtaataacattgctagtcaatagcaatttgttaataagatgcgctgggctcaatgtcttaataagaagtgtaagaggactatctccgaatttgttttgtttattaacatccgttgatggaagtaaaagatctataatgtctacattcttgactgttttagagcatacaatatggagaggtgtatttccatcatgatctggttttgagggactaattcctagtttcatcatccatgagattgtagaagcttttggattgtctgacataagatgtctatgaatatgatttttgccaaatttatccactatcctggcttcgaatccgatggacattatttttttaaacactctttctgaaggatctgtacacgccaacaacggaccacatccttcttcatcaaccgagttgttaatcttggctccatactgtaccaataaatttattctctctatgacttcatcatctgttcccgagagataatatagaggtgttttatgctgtttatcacacgcgtttggatctgcgccgtgcgtcagcagcatcgcgactattctattattattaattttagaagctatatgcaatggataatttccatcatcatccgtctcatttggagagtatcctctatgaagaagttcttcgacaaatcgttcatctagtcctttaattccacaatacgcatgtagaatgtgataattatttccagaaggttcgatagcttgtagcatattcctaaatacatctaaatttttactattatatttggcataaagagatagataatactcggccgacataatgttgtccattgtagtataaaaattaatatttctatttctatttctgtatatttgcaacaatttactctctataacaaatatcataacttagtttttttatgtcaagaaggcactggtttagttcatctataaatgtcacgccataactaccacgcatgccatactcagaattatgataaagatatttatccttggggtgtaggtaatggggattaatctttgttggatcagtctctaagttaacacatgtcacacatgatccatttatagttatatcacacgatgatgatttatgaattgattccggaagatcgctatcgtattttgtggttccacaattcatttccatacatgttattgtcacactaatattatgatgaactttatctagccgctgagtggtaaacaacagaacagatagtttattatctttaccaacaccctcagccgctgccacaaatctctgatccgtatccatgatggtcatgtttatttctagtccgtatccagtcaacactatgttagcatttctgtcgatatagctttcactcatatgacactcaccaataatagtagaattaatgtcgtaatttacaccaatagtgagttcggcggcaaagtaccaataccggtaatcttgtcgaggaggacatatagtattcttgtattctaccgaatacccgagagatgcgatacaaaagagcaagactaatttgtaaaccatcttactcaaaatatgtaacaatagtacgatgcaatgagtaagacaataggaaatctatcttatatacacataattattctatcaattttaccaattagttagtgtaatgttaacaaaaatgtgggagaatctaattagtttttctttacacaattgacgtacatgagtctgagttccttgtttttgctaattatttcatccaatttattattcttgacgatatcgagatcttttgtataggagtcaaacttgtattcaacatgcttttctataatcattttagctatttcggcatcatccaatagtacattttccagattagcagaatagatattaatgtcgtatttgaacagagcctgtaacatctcaatgtctttattatctatagccaatttaatgtccggaatgaagagaagggaattattggtgtttgtcgacgtcatatagtcgagcaagagaatcatcatatccacgtgtccattttttatagtgatgtgaatacaactaaggagaatagccagatcaaaagtagatggtatctctgaaagaaagtaggaaacaatacttacatcattaagcatgacggcatgataaaatgaagttttccatccagttttcccatagaacatcagtctccaatttttcttaacaaacagttttaccgtttgcatgttaccactatcaaccgcataatacaatgcggtgtttcccttgtcatcaaattgtgaatcatccagtccactgaatagcaaaatctttactattttggtatcttccaatgtggctgcctgatgtaatggaaattcattctctagaagatttttcaatgctccagcgttcaacaacgtacatactagacgcacgttattatcagctattgcataatacaaggcactatgtccatggacatccgccttaaatgtatctttactagagagaaagcttttcagctgcttagacttccaagtattaattcgtgacagatccatgtctgaaacgagacgctaattagtgtatattttttcattttttataattttgtcatattgcaccagaattaataatatctttaatagatctgattagtagatacatggctatcgcaaaacaacatatacacatttaataaaaataatatttattaagaaaattcagatttcacgtacccatcaatataaataaaataatgattccttacaccgtacccatattaaggagattccaccttacccataaacaatataaatccagtaatatcatgtctgatgatgaacacaaatggtgtattaaattccagtttttcaggagatgatctcgccgtagctaccataatagtagatgcctctgctacagttccttgttcgtcgacatctatctttgcattctgaaacattttataaatatataatgggtccctagtcatatgtttaaacgacgcattatctggattaaacatactaggagccatcatttcggctatcgacttaatatccctcttattttcgatagaaaatttagggagtttaagattgtacactttattccctaattgagacgaccaatagtctaattttgcagccgtgatagaatctgtgaaatgggtcatattatcacctattgccaggtacatactaatattagcatccttatacggaaggcgtaccatgtcatattctttgtcatcgattgtgattgtatttccttgcaatttagtaactacgttcatcatgggaaccgttttcgtaccgtacttattagtaaaactagcattgcgtgttttagtgatatcaaacggatattgccatatacctttaaaatatatagtattaatgattgcccatagagtattattgtcgagcatattagaatctactacattagacataccggatctacgttctactatagaattaattttattaaccgcatctcgtctaaagtttaatctatataggccgaatctatgatattgttgataatacgacggtttaatgcacacagtattatctacgaaactttgataagttagatcagtgtacgtatatttagatgttttcagcttagctaatcctgatattaattctgtaaatgctggacccagatctctttttctcaaatccatagtcttcaataattctattctagtattacctgatgcaggcaatagcgacataaacatagaaaacgaataaccaaacggtgagaagacaatattatcatcttgaatatttttatacgctactataccggcattggtaaatccttgtagacgataggcggacgctgaacacgctaacgatagtatcaataacgcaatcatgattttatggtattaataattaaccttatttttatgttcggtataaaaaaattattgatgtctacacatccttttgtaattgacatctatatatccttttgtataatcaactctaatcactttaacttttacagttttccctaccagtttatccctatattcaacatatctatccatatgcatcttaacactctctgccaagatagcttcagagtgaggatagtcaaaaagataaatatatagagcataatcattctcgtatactctgccctttattacatcacccgcattgggcaacgaataacaaaatgcaagcatcttgttaacgggctcgtaaattgggataaaaattatgtttttattgtcttatatctattttattcaagagaatattcaggaatttctttttccggttgtatctcgtcgcagtatatatcatttgtacattgtttcatattttttaatagtttacaccttttagtaggactagtatcgtacaattcatagctgtattttgaattccaatcacgcataaaaatatcttccaattgttgacgaagacctaatccatcatccggtgtaatattaatagatgctccacatgtatccgtaaagtaatttcctgtccaatttgaggtacctatataggccgttttatcggttaccatatatttggcatggtttaccctagaatacggaatgggaggatcagcatctggtacaataaatagctttacttctatatttatgtttttagattttagcatagcgatagatcttaaaaagtttctcatgataaacgaagatcgttgccagcaactaatcaatagcttaacggatacttgtctgtctatagcggatcttcttaattcatcttctatataaggccaaaacaaaattttacccgccttcgaataaataatagggataaagttcataacagatacataaacgaatttactcgcatttctaatacatgacaataaagcggttaaatcattggttctttccatagtacatagttgttgcggtgcagaagcaataaatacagagtgtggaacgccgcttacgttaatactaagaggatgatctgtattataatacgacggataaaagtttttccaattatatggtagattgttaactccaagataccagtatacctcaaaaatttgagtgagatccgctgccaagttcctattattgaagatcgcaatacccaattccttgacctgagttagtgatctccaatccatgttagcgcttcctaaataaatatgtgtattatcagatatccaaaattttgtatgaagaactcctcctaggatatttgtaatatctatgtatcgtacttcaactccggccatttgtagtctttcaacatcctttaatggtttgttagatttattaacggctactctaactcgtactcctcttttgggtaattgtacaatctcgtttaatattatcgtgccgaaattcgtacccacttcatccgataaactccaataaaaagatgatatatctagtgtttttgtggtattggatagaatttccctccacatgttaaatgtagacaaatatactttatcaaattgcatacctataggaatagtttctgtaatcactgcgattgtattatccggattcattttatttgttaaaagaataatcctatatcacttcactctattaaaaatccaagtttctatttctttcatgactgattttttaacttcatccgtttccttatgaagatgatgtttggcaccttcataaatttttatttctctattacaatttgcatgttgcatgaaataatatgcacctaaaacatcgctaatcttattgtttgttccctggagtatgagagtcggggggtgttaatcttggaaattatttttctaaccttgttggtagccttcaagacctgactagcaaatccagccttaattttttcatgattgactaatgggtcgtattggtatttataaactttatccatatctctagatactgattctggacatagctttccgactggcgcatttggtgtgatggttcccataagtttggcagctagcagattcagtcttgaaacagcatctgcattaactagaggagacattagaatcattgctgtaaacaagtttggattatcgtaagaggctagctcccatggaatgacccaataagtagatttaatagttaccacgtgctgtaccaaagtcatcaatcatcattttttcaccattacttcttccatgtccaatatgatcatgtgagaatactaaaattcctaacgatgatatgttttcagctagttcgtcataacgtccagaatgtttaccagctccatgacttatgaatactaatgccttaggatatgtaataggtttccaatatttacaatatatgtaatcattgtccagattgaacatacagtttgcactcatgattcacgttatataactatcaatattaacagttcgtttgatgatcatattatttttatgttttattgataattgtaaaaacatacaattaaatcaatatagaggaaggagacggctactgtcttttgtaagatagtcatggcgactaaattagattatgaggatgctgttttttactttgtggatgatgataaaatatgtagtcgcgactccatcatcgatctaatagatgaatatattacgtggagaaatcatgttatagtgtttaacaaagatattaccagttgtggaagactgtacaaggaattgatgaagttcgatgatgtcgctatacggtactatggtattgataaaattaatgagattgtcgaagctatgagcgaaggagaccactacatcaattttacaaaagtccatgatcaggaaagtttattcgctaccataggaatatgtgctaaaatcactgaacattggggatacaaaaagatttcagaatctagattccaatcattgggaaacattacagatttgatgaccgacgataatataaacatcttgatactttttctagaaaaaaaattgaattgatgatataggggtcttcataacgcataattattacgttagcattctatatccgtgttaaaaaaaattatcctatcatgtatttgagagttttatatgtagcaaacatgatagctgtgatgccaataagctttagatattcacgcgtgctagtgttagggatggtattatctggtggtgaaatgtccgttatataatctacaaaacaatcatcgcatatagtatgcgatagtagagtaaacatttttatagtttttactggattcatacatcgtctacccaattcggttataaatgaaattgtcgccaatcttacacccaaccccttgttatccattagcatagtattaacttcgttatttatgtcataaactgtaaatgattttgtagatgccatatcatacatgatattcatgtccctattataatcattactaactttatcacaatatatgttgataatatctatatatgatctagtctttgtgggcaactgtctatacaagtcgtctaaacgttgtttactcatatagtatcgaacagccatcattacatggtcccgttccgttgatagataatcgagtatgttagtggacttgtcaaatctatataccatattttctggaagtggatatacatagtcgtgatcaacattattgctagcctcatcttctatatcctgtactataccattatctatatcatctacataatctatgatattattacacataaacatcgacaacatactattgtttattatctaagtcctgttgatccaaacccttgatctcctctatttgtactatctagagattgtacttcttccagttctggataatatatacgttgatagattagctgagctattctatctccagtatttacattaaacgtacattttccattattaataagaatgactcctatgtttcccctataatcttcgtctattacaccacctcctatatcaatgccttttagtgacagaccagacctaggagctattctaccatagcagaacttaggcatggacatactaatatctgtcttaattaactgtctttctcctggagggatagtataatcgtaagcgctatacaaatcatatccggcagcacccggcgattgcctagtaggagatttagctctgttagtttccttaacaaatctaactggtgagttaatattcatgttgaacataaaactaatattttatttcaaaattatttaccatcccatatattccatgaataagtgtgatgattgtacacttctatagtatctatatacgatccacgataaaatcctcctatcaatagcagtttattatccactatgatcaattctggattatccctcggataaataggatcatctatcagagtccatgtattgctggattcacaataaaattccgcatttctaccaaccaagaataaccttctaccgaacactaacgcgcatgatttataatgaggataataagtggatggtccaaactgccactgatcatgattgggtagcaaatattctgtagttgtatcagtttcagaatgtcctcccattacgtatataacattgtttatggatgccactgctggattacatctaggtttcagaagactcggcatattaacccaagcagcatccccgtggaaccaacgctcaacagatgtgggatttggtagacctcctactacgtataatttattgttagcgggtatcccgctagcatacagtctggggctattcatcggaggaattggaatccaattgtttgatatataatttacagctatagcattgttatgtatttcattgttcatccatccaccgatgagatatactacttctccaacatgagtacttgtacacatatggaatatatctataatttgatccatgttcataggatactctatgaatggatacttgtatgatttgcgtggttgtttatcacaatgaaatattttggtacagtctagtatccattttacattatttatacctctgggagaaagataatttgacctgattacatttttgataaggagtagcagatttcctaatttatttcttcgcctcatataccacttaatgacaaaatcaactacataatcctcatctggaacatttagttcatcgctttctagaataagtttcatagatagataatcaaaattgtctatgatgtcatcttccagttccaaaaagtgtttggcaataaagtttttagtatgacataagagattggatagtccgtattctatacccatcatgtaacactcgacacaatattcctttctaaaatctcgtaagataaagtttatacaagtgtagatgataaattctacagaggttaatatagaagcacgtaataaattgacgacgttatgactatctatatatacctttccagtatatgagtaaataactatagaagttaaactgtgaatgtcaaggtctagacaaacccttgtaactggatctttatttttcgtgtatttttgacgtaaatgtgtgcgaaagtaaggagataactttttcaatatcgtagaattgactattatattgcctcctatggcatcaataattgttttgaatttcttagtcatagacaatgctaatatattcttacagtacacagtattgacaaatatcggcatttatgtttctttaaaagtcaacatctagagaaaaatgattatctttttgagacataactcccattttttggtattcacccacacgtttttcgaaaaaattagtttttccttccaatgatatattttccatgaaatcaaacggattggtaacattataaatttttttaaatcccaattcagaaatcaatctatccgcgacgaattctatatatgttttcatcatttcacaattcattcctataagtttaactggaagagccgcagtaagaaattcttgttcaatggatactgcatctgttataatagatctaacggtttcttcactcggtggatgcaataaatgtttaaacatcaaacatgcgaaatcgcagtgcagaccctcgtctctactaattagttcgttggaaaacgtgagtccgggcattaggccacgctttttaagccaaaatatggaagcgaatgatccagaaaagaaaattccttctactgcagcaaaggcaataagtctctctccataaccggcgctgtcatgtatccacttttgagcccaatcggccttcttttttacacaaggcatcgtttctatggcattaaagagatagtttttttcattactatctttaacataagtatcgatcaaaagactatacatttccgaatgaatgttttcaatggccatctgaaatccgtagaaacatctagcctcggtaatctgtacttctgtacaaaatcgttccgccaaattttcattcactattccgtcactggctgcaaaaaacgccaatacatgttttataaaatatttttcgtctggtgttagtttattccaatcattgatatctttagatatatctacttcttccactgtccaaaatgatgcctctgcctttttatacatgttccagatgtcatgatattggattgggaaaataacaaatctatttggatttggtgcaaggatgggttccataactaaattaacaataacaataaattttttttcagttatctatatgcctgtacttggattttttgtacatcgatatcgccgcaatcactacaataattacaagtattattgatagcattgttattagtactatcataattaaattatctacattcatgggtgctgaataatcgttattatcatcattatcattttgtaattgtgacatcatactagataaatcgtttgcgagattgttgtgggaagcgggcatggaggatgcattatcattattatttaacgccttccatttggattcacaaatgttacgcacattcaacattttatggaaactataattttgtgaaaacaaataacaagaaaactcgtcatcgttcaaatttttaacgatagtaaaccgattaaacgtcgagctaatttctaacgctagcgactctgttggatatgggtttccagatatatatcttttcagttcccctacgtatctataatcatctgtaggaaatggaagatatttccatttatctactgttcctaatatcatatgtggtggtgtagtagaaccattaagcgcgaaagatgttatttcgcatcgtattttaacttcgcaataatttctggttagataacgcactctaccagtcaagtcaatgatattagcctttacagatatattcatagtagtcgtaacgatgactccatcttttagatgcgatactcctttgtatgtaccagaatcttcgtacctcaaactcgatatatttaaacaagttaatgagatattaacgcgttttatgaatgatgatatataaccagaagttttatcctcggtggctagcgctataaccttatcattataataccaactagtgtgattaatatgtgacacgtcagtgtgggtacaaatatgtacattatcgtctacgtcgtattcgatacatccgcatacagccaacaaatataaaatgacaaatactctaacgccgttcgtacccatcttgatgcggtttaataaatgttttgatttcaatttattgtaaaaaaagattcggttttatactgttcgatattctcattgcttatattttcatctatcatctccacacagtcaaatccgtggttagcatgcacctcatcaaccggtaaaagactatcggactcttctatcattataactctagaatatttaatttggtcattattaatcaagtcaattatcttatttttaacaaacgtgagtattttactcattttttataaaaacttttagaaatatacagactctatcgtgtgtctatatcttctttttatatccaatgtatttatgtctgatttttcttcatttatcatatataatggtccaaattctacacgtgcttcggattcatccagatcattaaggttcttataattgtaacatccttctcttccctcttctacatcttccttcttattcttattcttagcgtcacagaatctaccacagcaggatcccatgacgagcgtcatattaaactaatccattttcaattataatatatgattagtaatgaccattaaaataaaaaatattcttcataaccggcaagaaagtgaaaagttcacattgaaactatgtcagtagtatacatcatgaaatgatgatatatatatactctattttggtggaggattatatgatataattcgtggataatcatttttaagacacatttctttattcgtaaatcttttcacgttaaatgagtgtccatattttgcaatttcttcatatgatggcggtgtacgtggacgaggctgctcctgttcttgttgtggtcgccgactgtcgtgtctgcgtttagatccctccattatcgcgattgcgtagatggagtactattttataccttgtaattaaatttttttattaattaaacgtataaaaacgttccgtatctgtatttaagagccagatttcgtctaatagaacaaatagctacagtaaaaataactagaataattgctacacccactagaaaccacggatcgtaatacggcaatcggttttcgataataggtggaacgtatattttatttaaggacttaacaattgtctgtaaaccacaatttgcttccgcggatcctgtattaactatctgtaaaagcatatgttgaccgggcggagccgaacattctccgatatctaatttctgtatatctataatattattaacctccgcatacgcattacagttcttttctagcttggataccgcactaggtacatcgtctagatctattcctatttcctcagcgatagctcttctatccttttccggaagcaatgaaatcacttcaataaatgattcaaccatgagtgtgaaactaagtcgagaattactcatgcatttgttagttattcggagcgcgcaatttttaaactgtcctataacctctcctatatgaatagcacaagtgacattagtagggatagaatgttgagctaatttttgtaaataactatctataaaaagattatacaaagttttaaactctttagtttccgccatttatccagtctgagaaaatgtctctcataataaatttttccaagaaactaattgggtgaagaatggaaacctttaatctatatttatcacagtctgttttggtacacatgatgaattcttccaatgccgtactaaattcgatatctttttcgatttctggatatgtttttaataaagtatgaacaaagaaatggaaatcgtaataccagttatgtttaactttgaaattgttttttattttcttgttaatgattccagccacttgggaaaagtcaaagtcgtttaatgccgatttaatacgttcattaaaaacaaactttttatcctttagatgaattattattggttcattggaatcaaaaagtaagatattatcgggtttaagatctgcgtgtaaaaagttgtcgcaacagggtagttcgtagattttaatgtataacagagccatctgtaaaaagataaactttatgtattgtaccaaagatttaaatcctaatttgatagctaactcggtatctactttatctgccgaatacagtgctaggggaaaaattataatgtttcctctttcatattcgtagttagttctcttttcatgttcgaaaaagtgaaacatgcggttaaaatagtttataacattaatattactgttaataactgccggataaaagtgggatagtaatttcacgaatttgatactgtcctttctctcgttaaacgcctttaaaaaaactttagaagaatatctcaatgagagttcctgaccatccatagtttgtatcaataatagcaacatatgaagaacacgtttatacagagtatgtaaaaatgttaatttatagtttaatcccatggcccacgcacacacgattaattttttttcatctccctttagattgttgtatagaaatttgggtactgtgaactccgccgtagtttccatgggactatataattttgtggcctcgaatacaaattttactacatagttatctatcttaaagactataccatatcctcctgtagatatgtgataaaaatcgtcgtttataggataaaatcgtttatccttttgttggaaaaaggatgaattaatgtaatcattctcttctatctttagtagtgtttccttattaaaattcttaaaataatttaacaatctaactgacggagcccaattttggtgtaaatctaattgggacattatattgttaaaatacaaacagtctcctaatataacagtatctgataatctatggggagacatccattgatattcaggggatgaatcattggcaacacccatttattgtacaaaaagccccaatttacaaacgaaagtccaggtttgatagagacaaacaattaactattttgtctctgtttttaacacctccacagtttttaatttctttagtaatgaaattattcacaatatcagtatcttctttatctaccagagattttactaacttgataaccttggctgtctcattcaatagggtagtaatatttgtatgtgtgatattgatatctttttgaattgtttcttttagaagtgattctttgatggtgccagcatacgaattacaataatgcagaaactcggttaacatgcaggaattatagtaagccaattccaattgttgcctgtgttgtattagagtgtcaatatgagcaatggtgtccttgcgtttctctgatagaatgcgagcagcgattttggcgttatcatttgacgatatttctggaatgacgaatcctgtttctactaactttttggtaggacaaagtgaaacaatcaagaagatagcttctcctcctatttgtggaagaaattgaactcctctagatgatctactgacgatagtatctccttgacagatattggaccgaattacagaagtacctggaatgtaaagccctgaaaccccctcattttttaagcagattgttgccgtaaatcctgcactatgcccaagatagagagctcctttggtgaatccatctctatgtttcagtttaaccaagaaacagtcagctggtctaaaatttccatctctatctaatacagcatctaacttgatgtcaggaactatgaccggtttaatgttatatgtaacattgagtaaatccttaagttcataatcatcactgtcatcagttatgtacgatccaaacaatgtttctaccggcatagtggatacgaagatgctatccatcagaatgtttccctgattagtattttctatatagctattcttctttaaacgattttccaaatcagtaactatgttcatttttttaggagtaggacgcctagccagtatggaagaggattttctagatcctctcttcaacatctttgatctcgatggaatgcaaaaccccatagtgaaacaaccaacgataaaaataatattgtttttcactttttataattttaccatctgactcatggattcattaatatctttataagagctactaacgtataattctttataactgaactgagatatatacaccggatctatggtttccataattgagtaaatgaatgctcggcaataactaatggcaaatgtatagaacaacgaaattatactagagttgttaaagttaatattttctatgagctgttccaataaattatttgttgtgactgcgttcaagtcataaatcatcttgatactatccagtaaaccgtttttaagttctggaatattatcatcccattgtaaagcccctaattcgactatcgaatatcctgctctgatagcagtttcaatatcgacggacgtcaatactgtaataaaggtggtagtattgtcatcatcgtgataaactacgggaatatggtcgttagtaggtacggtaactttacacaacgcgatatataactttccttttgtaccatttttaacgtagttgggacgtcctgcagggtattgttttgaagaaatgatatcgagaacagatttgatacgatatttgttggattcctgattattcactataatataatctagacagatagatgattcgataaatagagaaggtatatcgttggtaggataatacatccccattccagtattctcggatactctattgatgacactagttaagaacatgtcttctattctagaaaacgaaaacatcctacatggactcattaaaacttctaacgctcctgattgtgtctcgaatgcctcgtacaaggatttcaaggatgccatagattctttgaccaacgatttagaattgcgtttagcatctgatttttttattaaatcgaatggtcggctctctggtttgctaccccaatgataacaatagtcttgtaaagataaaccgcaagaaaatttatacgcatccatccaaataaccctagcaccatcggatgatattaatgtattattatagattttccatccacaattattgggccagtatactgttagcaacggtatatcgaatagattactcatgtaacctactagaatgatagttcgtgtactagtcataatatctttaatccaatctaaaaaatttaaaattagattttttacactgttaaagttaacaaaagtattacccgggtacgtggatatcatatatggcattggtccattatcagtaatagctccataaactgatacggcgatggtttttatatgtgtttgatctaacgaggaagaaattcgcgcccacaattcatctctagatatgtatttaatatcaaacggtaacacatcaatttcgggacgcgtatatgtttctaaatttttaatccaaatataatgatgacctatatgccctattatcatactgtcaactatagtacacctagggaacttacgatacatctgtttcctataatcgttaaattttacaaatctataacatgctaaaccttttgacgacagccattcattaatttctgatatggaatctgtattctcgataccgtatcgttctaaagccagtgctatatctccctgttcgtgggaacgctttcgtataatatcgatcaacggataatctgaagtttttggagaataatatgactcatgatctatttcgtccataaacaatctagacataggaattggaggcgatgatcttaattttgtgcaatgagtcgtcaatcctataacttctaatcttgtaatattcatcatcgacataatactatctatgttatcatcgtatattagtataccatgaccttcttcatttcgtgccaaaatgatatacagtcttaaatagttacgcaatatctcaatagtttcataattgttagctgttttcatcaaggtttgtatcctgtttaacatgatggcgttctataacgtctctattttctatttttaattttttaaatttttaacgatttactgtggctagatacccaatctctctcaaatatttttttagcctcgcttacaagctgtttatctatactattaaaactgacgaatccgtgattttggtaatgggttccgtcgaaatttgccgaagtgatatgaacatattcgtcgtcgactatcaacaattttgtattattctgaatagtgaaaaccttcacagatagatcattttgaacacacaacgcatctagacttttggcggttgccatagaatatacgtcgttcttatcccaattaccaactagaagtctgatcttaactcctctattaatggctgcttctataatggagttgtaaatgtcgggccaatagtagctattaccgtcgacacgtgtagtgggaactatggccaaatgttcaatatctatactagtcttagctgacctgagtttatcaataactacatcggtatctagatctctagaatatcccaataggtgttccggagaatcagtaaagaacactccacctataggattcttaatatgatacgcagtgctaactggcaaacaacaagccgcagagcataaattcaaccatgaattttttgcgctattaaaggctttaaaagtatcaaatcttctacgaagatctgtggccagcgggggataatcagaatatacacctaacgttttaatcgtatgtatagatcctccagtaaatgacgcgtttcctacataacatctttcatcatctgacacccaaaaacaaccgagtagtagtcccacattattttttttatctatattaacggttataaaatttatatccgggcagtgactttgtagctctcccagatttcttttccctcgttcatctagcaaaactattattttaatccctttttcagatgcctcttttagtttatcaaaaataagcgctcccctagtcgtactcagaggattacaacaaaaagatgctatgtatatatatttcttagctagagtgataatttcgttaaaacattcaaatgttgttaaatgatcggatctaaaatccatattttctggtagtgtttctaccagcctacattttgctcccgcaggtaccgatgcaaatggccacatttagttaacataaaaacttatacatcctgttctatcaacgattctagaatatcatcggctatatcgctaaaattttcatcaaagtcgacatcacaacctaactcagtcaatatattaagaagttccatgatgtcatcttcgtctatttctatatccgtatccattgtagattgttgaccgattatcgagtttaaatcattactaatactcaatccttcagaatacaatctgtgtttcattgtaaatttataggcggtgtatttaagttggtagattttcaattatgtattaatatagcaacagtagttcttgctcctccttgattctagcatcctcttcattattttcttctacgtacataaacatgtccaatacgttagacaacacaccgacgatggcggccgcagatctcgagttatgatctacttccttaccgtgcaataaattagaatatattttctacttttacgagaaattaattattgtatttattatttatgggtgaaaaacttactataaaaagcgggtgggtttggaattagtgaaagcttaaaaattgaaattttattttttttttttggaatataaataagctcgaagtcgacagatctaggcctggtaccaggaggaggaattcagcttaaagatgacttcgaaagtttatgatccagaacaaaggaaacggatgataactggtccgcagtggtgggccagatgtaaacaaatgaatgttcttgattcatttattaattattatgattcagaaaaacatgcagaaaatgctgttatttttttacatggtaacgcggcctcttcttatttatggcgacatgttgtgccacatattgagccagtagcgcggtgtattataccagatcttattggtatgggcaaatcaggcaaatctggtaatggttcttataggttacttgatcattacaaatatcttactgcatggtttgaacttcttaatttaccaaagaagatcatttttgtcggccatgattggggtgcttgtttggcatttcattatagctatgagcatcaagataagatcaaagcaatagttcacgctgaaagtgtagtagatgtgattgaatcatgggatgaatggcctgatattgaagaagatattgcgttgatcaaatctgaagaaggagaaaaaatggttttggagaataacttcttcgtggaaaccatgttgccatcaaaaatcatgagaaagttagaaccagaagaatttgcagcatatcttgaaccattcaaagagaaaggtgaagttcgtcgtccaacattatcatggcctcgtgaaatcccgttagtaaaaggtggtaaacctgacgttgtacaaattgttaggaattataatgcttatctacgtgcaagtgatgatttaccaaaaatgtttattgaatcggatccaggattcttttccaatgctattgttgaaggcgccaagaagtttcctaatactgaatttgtcaaagtaaaaggtcttcatttttcgcaagaagatgcacctgatgaaatgggaaaatatatcaaatcgttcgttgagcgagttctcaaaaatgaacaagcggccgccgccaccatgagcaagggcgaggaactgttcactggcgtggtcccaattctcgtggaactggatggcgatgtgaatgggcacaaattttctgtcagcggagagggtgaaggtgatgccacatacggaaagctcaccctgaaattcatctgcaccactggaaagctccctgtgccatggccaacactggtcactaccttcacctatggcgtgcagtgcttttccagatacccagaccatatgaagcagcatgactttttcaagagcgccatgcccgagggctatgtgcaggagagaaccatctttttcaaagatgacgggaactacaagacccgcgctgaagtcaagttcgaaggtgacaccctggtgaatagaatcgagctgaagggcattgactttaaggaggatggaaacattctcggccacaagctggaatacaactataactcccacaatgtgtacatcatggccgacaagcaaaagaatggcatcaaggtcaacttcaagatcagacacaacattgaggatggatccgtgcagctggccgaccattatcaacagaacactccaatcggcgacggccctgtgctcctcccagacaaccattacctgtccacccagtctgccctgtctaaagatcccaacgaaaagagagaccacatggtcctgctggagtttgtgaccgctgctgggatcacacatggcatggacgagctgtacaagtgagcggccgccctgctagcaagcttgctagcggccgctcgagatctgcggccgctacagacacgaatatgactaaaccgatgaccatttaaaaacccctctctagctttcacttaaactgtatcgatcattcttttagcacatgtataatataaaaacattattctatttcgaatttaggcttccaaaaatttttcatccgtaaaccgataataatatatatagacttgttaatagtcggaataaatagattaatgcttaaactatcatcatctccacgattagagatacaatatttacattctttttgctgtttcgaaactttatcaatacacgttaatacaaacccaggaaggagatattgaaactgaggctgttgaaaatgaaacggtgaatacaataattcagataatgtaaaatcatgattccgtattctgatgatattagaactgctaatggatgtcgatggtatgtatctaggagtatctattttaacaaagcatcgatttgctaatatacaattatccttttgattaattgttattttattcatattcttaaaaggtttcatatttatcaattcttctacattaaaaatttccatttttaatttatgtagccccgcaatactcctcattacgtttcattttttgtctataatatccattttgttcatctcggtacatagattatccaattgagaagcgcatttagtagttttgtacattttaagtttattgacgaatcgtcgaaaactagttatagttaacattttattatttgataccctgatattaatacccctgccgttactattatttataactgatgtaatccacgtaacattggaattaactatcgatagtaatgcatcgacgcttccaaaattgtctattataaactcaccgataatttttttattgcatgttttcatattcattaggattatcaaatctttaatcttattacgattgtatgcgttgatattacaagacgtcattctaaaagacggaggatctccatcaaatgccagacaatcacgtacaaagtacatggaaataggttttgttctattgcgcatcatagatttatatagaacacccgtagaaatactaatttgttttactctataaaatactaatgcatctatttcatcgttttgtataacgtctttccaagtgtcaaattccaaatttttttcattgatagtaccaaattcttctatctctttaactacttgcatagataggtaattacagtgatgcctacatgccgttttttgaaactgaatagatgcgtctagaagcgatgctacgctagtcacaatcaccactttcatatttagaatatatatatgtaaaaatatagtagaatttcattttgtttttttctatgctataaatgaattctcattttgcatctgctcatactccgttttatattaataccaaagaaggaagatatctggttctaaaagccgttaaagtatgcgatgttagaactgtagaatgcgaaggaagtaaagcttcctgcgtactcaaagtagataaaccctcatcgcccgcgtgtgagagaagaccttcgtccccgtccagatgcgagagaatgaataaccctggaaaacaagttccgtttatgaggacggacatgctacaaaatatgttcgcggctaatcgcgataatgtagcttctagacttttgtcctaaaatactattatatccttttcgatattaataaatccgtgtcgtccaggttttttatctctttcagtatgtgaatagataggtattttatctctattcatcatcgaatttaagagatccgataaacattgtttgtattctccagatgtcagcatctgatacaacaatatatgtgcacataaacctctggcacttatttcatgtaccttccccttatcactaaggagaatagtatttgagaaatatgtatacatgatattatcatgaattagatatacagaatttgtaacactctcgaaatcacacgatgtgtcggcgttaagatctaatatatcactcgataacacattttcatctagatacactagacattttttaaagctaaaatagtctttagtagtaacagtaactatgcgattattttcatcgatgatacatttcatcggcatattattacgcttaccatcaaagactataccatgtgtatatctaacgtattctagcatggttgccatacgcgcattaaacttttcaggatctttggatagatcttccaatctatctatttgagaaaacatttttatcatgttcaatagttgaaacgtcggatccactatatagatattatctataaagattttaggaactacgttcatggtatcctggcgaatattaaaactatcaatgatatgattatcgttttcatcttttatcaccatatagtttctaagatatgggattttacttaatataatattatttcccgtgataaattttattagaaaggccaaatctataagaaaagtcctagaattagtctgaagaatatctatatcgccgtatagtatatttggattaattagatatagagaatatgatccgtaacatatacaacttttattatggcgtctaagatattcttccatcaacttattaacatttttgactagggaagatacattatgacgtcccattacttttgccttgtctattactgcgacgttcatagaatttagcatatctcttgccaattcttccattgatgttacattataagaaattttagatgaaattacatttggagctttaatagtaagaactcctaatatgtccgtgtatgtggtcactaatacagattgtagttctataatcgtaaataatttacctatattatatgtttgagtctgtttagaaaagtagctaagtatacgatcttttatttctgatgcagatgtattaacatcggaaaaaaatctttttttattcttttttactaaagatacaaatatgtctttgttaaaaacagttattttctgaatatttctagcttgtaattttaacatatgatattcgttcacactaggtactctgcctaaataggtttctataatctttaatgtaatattaggaaaagtattctgatcaggattcctattcattttgaggatttaaaactctgattattgtctaatatggtctctacgcaaactttttcacagagcgatagagtttttgataactcgtttttcttaagaaatataaaactactgtctccagagctcgctctatcttttattttatctaattcgatacaaactcctgatactggttcagaaagtaattcattaattttcagtcctttatagaagatatttaatatagataatacaaaatcttcagtttttgatatcgatctgattgatcctagaactagatatattaataacgtgctcattaggcagtttatggcagcttgataattagatatagtatattccagttcatatttattagataccgcattgcccagattttgatattctatgaattcctctgaaaataaatccaaaataactagacattctattttttgtggattagtgtactctcttccctctatcatgttcactactggtgtccacgatgataaatatctagagggaatataatatagtccataggatgccaatctagcaatgtcgaataactgtaattttattcttcgctcttcattatgaattgattcttgaggtataaacctaacacaaattatattattagacttttcgtatgtaatgtctttcatgttataagtttttaatcctggaatagaatctattttaatgaggcttttaaacgcagagttctccaacgagtcaaagcataatactctgttgtttttcttatatacgatgttacgattttcttctttgaatggaataggtttttgaattagtttataattacaacataatagataaggaagtgtgcaaatagtacgcggaaaaaacataatagctcccctgttttcatccatggttttaagtaaatgatcactggcttctttagtcaatggatattcgaacattaaccgtttcatcatcattggacagaatccatatttcttaatgtaaagagtgatcaaatcattgtgtttattgtaccatcttgttgtaaatgtgtattcggttatcggatctgctcctttttctattaaagtatcgatgtcaatctcgtctaagaattcaactatatcgacatatttcatttgtatacacataaccattactaacgtagaatgtataggaagagatgtaacgggaacagggtttgttgattcgcaaactattctaatacataattcttctgttaatacgtcttgcacgtaatctattatagatgccaagatatctatataattattttgtaagatgatgttaactatgtgatctatataagtagtgtaataattcatgtattttgatatatgttccaactctgtctttgtgatgtctagtttcgtaatatctatagcatcctcaaaaaatatattcgcatatattcccaagtcttcagttctatcttctaaaaaatcttcaacgtatggaatataataatctattttacctcttctgatatcattaatgatatagtttttgacactatcttctgtcaattgattcttattcactatatctaagaaacggatagcgtccctaggacgaactactgccattaatatctctattatagcttctggacataattcatctattataccagaattaatgggaactattccgtatctatctaacatagttttaagaaagtcagaatctaagacttgatgttcatatattggttcatacatgaaatgatctctattgatgatagtgactatttcattctctgaaaattggtaactcattctatatatgctttccttgttgatgaaggatagaatatactcaatagaatttgtaccaacaaactgttctcttatgaatcgtatatcatcatctgaaataatcatgtaaggcatacatttaacaattagagacttgtctcctgttatcaatatactattcttgtgataatttatgtgtgaggcaaatttgtccacgttctttaattttgttatagtagatatcaaatccaatggagctacagttcttggcttaaacagatatagtttttctggaacaaattctacaacattattataaaggactttgggtagataagtgggatgaaatcctattttaattaatgcgatagccttgtcctcgtgcagatatccaaacgcttttgtgatagtatggcattcattgtctagaaacgctctacgaatatctgtgacagatatcatctttagagaatatactagtcgcgttaatagtactacaatttgtattttttaatctatctcaataaaaaaattaatatgtatgattcaatgtataactaaactactaactgttattgataactagaatcagaatctaatgatgacgtaaccaagaagtttatctactgccaatttagctgcattatttttagcatctcgtttagattttccatcggccttatcgaatactcttccgtcgatgtctacacaggcataaaatgtaggagagttactaggcccaactgattcaatacgaaaagaccaatctctcctagtaatttggcagtactcattaataacggtgacagggttagcatctttccaatcaataatttttttagccggaataacatcatcaaaagacttatgatcctctctcattgatttttcgcgggatacatcatctattatgacgtcagccatagcatcagcatccggcttatccgcctccgttgtcataaaccaacgaggaggaatatcgtcggagctgtacaccatagcactacgttgaagatcgtacagagctttattaacttctcgcttctccatattaagttgtctagttagttgtgcagcagtagctccttcgattccaatgtttttaatagccgcacacacaatctctgcgtcagaacgctcgtcaatatagatcttagacatttttagagagaactaacgcaaccagcaataaaactgaacctactttatcatttttttattcatcatcctctggtggttcgtcgttcctatcaaatgtagctctgattaacccgtcatctataggtgatgctggttctggagattctggaggagatggattattatctggaagaatctctgttatttccttgttttcatgtatcgattgcgttgtaacattaagattgcgaaatgctctaaatttgggaggcttaaagtgttgtttgcaatctctacacgcgtgtctaactagtggaggttcgtcagctgctctagtttgaatcatcatcggcgtagtattcctacttttacagttaggacacggtgtattgtatttctcgtcgagaacgttaaaataatcgttgtaactcacatcctttattttatctatattgtattctactcctttcttaatgcattttataccgaataagagatagcgaaggaattctttttcggtgccgctagtacccttaatcatatcacatagtgttttatattccaaatttgtggcaatagacggtttatttctatacgatagtttgtttctggaatcctttgagtattctataccaatattattctttgattcgaatttagtttcttcgatattagattttgtattacctatattcttgatgtagtactttgatgatttttccatggcccattctattaagtcttccaagttggcatcatccacatattgtgatagtaattctcggatatcagtagcggctaccgccattgatgtttgttcattggatgagtaactactaatgtatacattttccatttataacacttatgtattaactttgttcatttatattttttcattattatgttgatattaacaaaagtgaatatatatatgttaataattgtattgtggttatacggctacaattttataatgagtgaaagtcagtgtccgatgatcaatgacgatagctttactctgaaaagaaagtatcaaatcgatagtgcggagtcaacaataaaaatggataagaagaggataaagtttcagaatagagccaaaatggtaaaagaaataaatcagacaataagagcagcacaaactcattacgagacattgaaactaggatacataaaatttaagagaatgattatgactactactctagaagatatagcaccatctattccaaataatcagaaaacttataaactattctcggacatttcagccatcggcaaagcatcacagaatccgagtaagatggtatatgctctgctgctttacatgtttcccaatttgtttggagatgatcatagattcattcgttatagaatgcatccaatgagtaaaatcaaacacaagatcttctctcctttcaaacttaatcttattagaatattagtggaagaaagattctataataatgaatgcagatctaataaatggagaataattggaacacaagttgataaaatgttgatagctgaatctgataaatatacaatagatgcaaggtataacctaaaacccatgtatagaatcaagggagaatctgaagaagataccctctttatcaaacagatggtagaacaatgtgtgacatcccaggaattggtggaaaaagtgttgaagatactgtttagagatttgttcaagagtggagaatacaaagcgtacagatacgatgatgatgtagaaaatggatttattggattggatacactaaaattaaacattgttcatgatatagttgaaccatgtatgcctgttcgtaggccagtggctaagatactgtgtaaagaaatggtaaataaatactttgagaatccgctacatattattggtaaaaatcttcaagagtgcattgactttgttagtgaataggcatttcatctttctccaatactaattcaaattgttaaattaataatggatagtataaatagttattagttataagatagtaaaaataattattagaataagagtgtagtatcatagataactctcttctataaaaatggattttattcgtagaaagtatcttatatacacagtagaaaataatatagattttttaaaggatgatacattaagtaaagtaaacaattttaccctcaatcatgtactagctctcaagtatctagttagcaattttcctcaacacgttattactaaggatgtattagctaataccaatttttttgttttcatacatatggtacgatgttgtaaagtgtacgaagcggttttacgacacgcatttgatgcacccacgttgtacgttaaagcattgactaagaattatttatcgtttagtaacgcaatacaatcgtacaaggaaaccgtgcataaactaacacaagatgaaaaatttttagaggttgccgaatacatggacgaattaggagaacttataggcgtaaattatgacttagttcttaatccattatttcacggaggggaacccatcaaagatatggaaatcatttttttaaaactgtttaagaaaacagacttcaaagttgttaaaaaattaagtgttataagattacttatttgggcatacctaagcaagaaagatacaggcatagagtttgcggataatgatagacaaaatatatacactctatttcaacaaactggtagaatcgtccatagcaatctaacagaaacgtttagagattatatctttcccggagataagactagctattgggtgtggttaaacgaaagtatagctaatgatgcggatatcgttcttaatagacacgccattaccatgtatgataaaattcttagttatatatactctgagataaaacaaggacgcgttaataaaaacatgcttaagttagtttatatctttgagcctgaaaaagatatcagagaacttctgctagaaatcatatatgatattcctggagatatcctatctattattgatgcaaaaaacgacgattggaaaaaatattttattagtttttataaagctaattttattaacggtaatacatttattagtgatagaacgtttaacgaggacttattcagagttgttgttcaaatagatcccgaatatttcgataatgaacgaattatgtctttattctctacgagtgctgcggacattaaacgatttgatgagttagatattaataacagttatatatctaatataatttatgaggtgaacgatatcacattagatacaatggatgatatgaagaagtgtcaaatctttaacgaggatacgtcgtattatgttaaggaatacaatacatacctgtttttgcacgagtcggatcccatggtcatagagaacggaatactaaagaaactgtcatctataaaatccaagagtagacggctgaacttgtttagcaaaaacattttaaaatattatttagacggacaattggctcgtctaggtcttgtgttagatgattataaaggagacttgttagttaaaatgataaaccatcttaagtctgtggaggatgtatccgcattcgttcgattttctacagataaaaaccctagtattcttccatcgctaatcaaaactattttagctagttataatatttccatcatcgtcttatttcaaaggtttttgagagataatctatatcatgtagaagaattcttggataaaagcatccatctaaccaagacggataagaaatatatacttcaattgataagacacggtagatcatagaacagaccaaatatattattaataatttgtatatacatagatataattatcacacatttttgataaatgggaactgctgcaacaattcagactcccaccaaattaatgaataaagaaaatgcagaaatgattttggaaaaaattgttgatcatatagttatgtatattagtgacgaatcaagtgattcagaaaataatcctgaatatattgattttcgtaacagatacgaagactatagatctctcattataaaaagtgatcacgagtttgtaaagctatgtaaaaatcatgcggagaaaagttctccagaaacgcaacaaatgattatcaaacacatatacgaacaatatcttattccagtatctgaagtactattaaaacctataatgtccatgggtgacataattacatataacggatgtaaagacaatgaatggatgctagaacaactctctaccctaaactttaacaatctccgcacatggaactcatgtagcataggcaatgtaacgcgtctgttttatacattttttagttatctgatgaaagataaactaaatatataagtataatcccattctaatactttaacctgatgtattagcatcttattagaatattaacctaactaaaagacataacataaaaactcattacatagttgataaaaagcggtaggatataaatattatggctgccaccgttccgcgttttgacgacgtgtacaaaaatgcacaaagaagaattctagatcaagaaacattttttagtagaggtctaagtagaccgttaatgaaaaacacatatctatttgataattacgcgtatggatggataccagaaactgcaatttggagtagtagatacgcaaacctagatgctagtgactattatcccatttcgttgggattacttaaaaagttcgagtttctcatgtctctatataaaggtcctattcccgtatatgaagaaaaagtaaatactgaattcatagccaatggatcgttctctggtagatacgtatcatatcttcgaaagttttctgcccttccaacaaacgagtttattagttttttgttactgacttccattccaatctataatatcttgttctggtttaaaaacacacagtttgatattactaaacacacattattcagatacgtctatacagataatgccaaacacctggcgttggctaggtatatgcatcaaacaggagactataagcctttgtttagtcgtctcaaagagaattatatatttaccggtcccgttccaataagtatcaaagatatagatcaccctaatcttagtagagcaagaagtccatccgattatgagacattagctaatattagtactatattgtactttaccaagtatgatccggtattaatgtttttattgttttacgtacctgggtattcaattactacaaaaattactccagccgtagaatatctaatggataaactgaatctaacaaagagcgacgtacaactgttgtaaattattttatgcttcgtaaaatgtaggttttgaaccaaacattctttcaaagaatgagatgcataaaactttattatccaatagattgactatttcggacgtcaatcgtttaaagtaaacttcgtaaaatattctttgatcactgccgagtttaaaacttctatcgataattgtctcatatgttttaatatttacaagttttttggtccatggtacattagccggacaaatatatgcaaaataatatcgttctccaagttctatagtttctggattatttttattatattcagtaactaaatacatattagggttatctgcggatttataatttgagtgatgcattctactcaacataaataattctagaggagacgatctactatcaaattcggatcgtaaatctgtttctaaagaacggagaatatctatacatacctgattagaattcatccgtccttcagacaacatctcagacagtctggttttgtacatcttaatcatattcttatgaaacttggaaacatctcttctagtttcactagtacctttattaattctctcaggtacagattttgaattcgacgatgctgagtatttcatcgttgtatatttcttcttcgattgcataatcagattcttatataccgcctcaaactctattttaaaattattaaacaatactctattattaatcagtcgttctaactctttcgctatttctatagacttatctacatcttgactgtctatctctgtaaacacggagtcggtatctccatacacgctacgaaaacgaaatctgtaatctataggcaacgatgttttcacaatcggattaatatctctatcgtccatataaaatggattacttaatggattggcaaaccgtaacataccgttagataactctgctccatttagtaccgattctagatacaagatcattctacgtcctatggatgtgcaactcttagccgaagcgtatgagtatagagcactatttctaaatcccatcagaccatatactgagttggctactatcttgtacgtatattgcatggaatcatagatggccttttcagttgaactggtagcctgttttagcatctttttatatctggctctctctgccaaaaatgttcttaatagtctaggaatggttccttctatcgatctatcgaaaattgctatttcagagatgaggttcggtagtctaggttcacaatgaaccgtaatatatctaggaggtggatatttctgaagcaatagctgattatttatttcttcttccaatctattggtactaacaacgacaccgactaatgtttccggagatagatttccaaagatacacacattaggatacagactgttataatcaaagattaatacattattactaaacattttttgttttggagcaaataccttaccgccttcataaggaaacttttgttttgtttctgatctaactaagatagttttagtttccaacaatagctttaacagtggacccttgatgactgtactcgctctatattcgaataccatggattgaggaagcacatatgttgacgcacccgcgtctgtttttgtttctactccataatactcccacaaatactgacacaaacaagcatcatgaatacagtatctagccatatctaaagctatgtttagattataatccttatacatctgagctaaatcaacgtcatcctttccgaaagataatttatatgtatcattaggtaaagtaggacataatagtacgactttaaatccattttcccaaatatctttacgaattactttacatataatatcctcatcaacagtcacataattacctgtggttaaaacctttgcaaatgcagcggctttgcctttcgcgtctgtagtatcgtcaccgatgaacgtcatttctctaactcctctatttaatactttacccatgcaactgaacgcgttcttggatatagaatccaatttgtacgaatccaatttttcaaatttttgaatgaatgaatatagatcgaaaaatatagttccattattgttattaacgtgaaacgtagtattggccatgccgcctactcccttatgactagactgatttctctcataaatacagagatgtacagcttcctttttgtccggagatctaaagataattttctctcctgttaataactctagacgattagtaatatatctcagatcaaagttatgtccgttaaaggtaacgacgtagtcgaacgttagttccaacaattgtttagctattcgtaacaaaactatttcagaacatagaactagttctcgttcgtaatccatttccattagtgactgtatcctcaaacatcctctatcgacggcttcttgtatttcctgttccgttaacatctcttcattaatgagcgtaaacaataatcgtttaccacttaaatcgatataacagtaacttgtatgcgagattgggttaataaatacagaaggaaacttcttatcgaagtgacactctatatctagaaataagtacgatcttgggatatcgaatctaggtatttttttagcgaaacagttacgtggatcgtcacaatgataacatccattgttaatctttgtcaaatattgctcgtccaacgagtaacatccgtctggagatatcccgttagaaatataaaaccaactaatattgagaaattcatccatggtggcattttgtatgctgcgtttctttggctcttctatcaaccacatatctgcgacggagcattttctatctttaatatctagattataacttattgtctcgtcaatgtctatagttctcatctttcccaacggcctcgcattaaatggaggaggagacaatgactgatatatttcgtccgtcactacgtaataaaagtaatgaggaaatcgtataaatacggtctcgccatttcgacatctggatttcagatataaaaatctgttttcaccgtgactttcaaaccaattaatgcaccgaacatccatttatagaatttagaaatatattttcatttaaatgaatcccaaacattggggaagagccgtatggaccattatttttatagtactttcgcaagcgggtttagacggcaacatagaagcgtgtaaacgaaaactatatactatagttagcactcttccatgtcctgcatgtagacggcacgcgactatcgctatagaggacaataatgtcatgtctagcgatgatctgaattatatttattattttttcatcagattatttaacaatttggcatctgatcccaaatacgcgatcgatgtgacaaaggttaaccctttataaacttaacccattataaaacttatgattagtcacaactgaaataaccgcgtgattattttttggtataattctacacggcatggtttctgtgactatgaattcaacccccgttacattagtgaaatctttaacaaacagcaagggttcgtcaaagacataaaactcattgtttacaatcgaaatagaccccctatcacacttaaaataaaaaatatccttatcctttaccaccaaataaaattctgattggtcaatgtgaatgtattcacttaacagttccacaaatttatttattaactccgaggcacatacatcgtcggtattttttatggcaaactttactcttccagcatccgtttctaaaaaaatattaacgagttccatttatatcatccaatattattgaaatgacgttgatggacagatgatacaaataagaaggtacggtacctttgtccaccatctcctccaattcatgctctattttgtcattaactttaatgtatgaaaacagtacgccacatgcttccatgacagtgtgtaacactttggatacaaaatgtttgacattagtataattgtccaagactgtcaatctataatagatagtagctataatatattctatgatggtattgaagaagatgacaaccttggcatattgatcatttaacacagacatggtatcaacagatagcttgaatgaaagagaatcagtaattggaataagcgtcttctcgatagagtgtccgtataccaacatgtctgatattttgatgtattccattaaattatttagttttttctttttattctcgttaaacagcatttctgtcaacggaccccaacatcgttgaccgattaagttttgattgatttttccgtgtaaggcgtatctagtcagatcgtatagcctatccaataatccatcgtctgtgtgtagatcacatcgtacactttttaattctctatagaagagcgacagacatctggagcaattacagacagcaatttctttattctctacagatgtaagatacttgaagacattcctatgatgatgcagaattttggataacacggtattgatggtatctgttaccataattcctttgatggctgatagtgtcagagcacaagatttccaatctttgacaatttttagcaccattatctttgttttgatatctatatcagacagcatggtgcgtctgacaacacagggattaagacggaaagatgaaatgattctctcaacatcttcaatagataccttgctattttttctggcattatctatatgtgcgagaatatcctctagagaatcagtatcctttttgatgatagtggatctcaatgacatgggacgtttaaaccttcttattctatcaccagattgcatggtgatttgtcttctttcttttatcataatgtaatctctaaattcatcggcaaattgtctatatctaaaatcataatatgagatgtttacctctacaaatatctgttcgtccaatgttagagtatttacatcagttttgtattccaaattaaacatggcaacggatttaattttatattcctctattaagtcctcgtcgataataacagaatgtagataatcatttaatccgtcgtacatggttggaagatgcttgttgacaaaatctttaattgtcttgatgaaggtgggactatatctaacatcttgattaataaaatttataacattgtccataggatactttgtaactagttttatacacatctcttcatcggtaagtttagacagaatatcgtgaacaggtggtatattatattcatcagatatacgaagaacaatgtccaaatctatattgtttaatatattatatagatgtagcgtagctcctacaggaatatctttaactaagtcaatgatttcatcaaccgttagatctattttaaagttaatcatataggcattgatttttaaaaggtatgtagccttgactacattctcattaattaaccattccaagtcattgtgtgtaagaagattatattctatcataagcttgactacatttggtcccgataccattaaagaattcttatgatataaggaaacagattttaggtactcatctactctacaagaattttggagagccttaacgatatcagtgacgtttattatttcaggaggaaagaatctaacattgagaatatcggaattaatagcttccagatacagtgattttggcaatagtccgtgtaatccataatccagtaacacgagctggtgcttgctagacaccttttcaatgtttaatttttttgaaataagctttgataaagccttcctcgcaaattccggatacatgaacatgtcggcgacatgattaagtattgttttttcattatttttatattttctcaacaagttctcaataccccaatagatgatagaatatcacccaatgcgtccatgttgtctatttccaacaggtcgctatatccaccaatagaagtttttccaaaaaagattctaggaacagttctaccaccagtaatttgttcaaaataatcccgcaattcattttcgggtttaaattctttaatatcgacaatttcatacgctcctcttttgaaactaaacttatttagaatatccagtgcatttctacaaaaaggacatgtatacttgacaaaaattgtcactttgttattggccaacctttgttgtacaaattcctcggccattttaatatttaagtgatataaaactatctcgacttatttaactctttagtcgagatatatggacgcagatagctatatgatagccaactacagaaggcaaacgctataaaaaacataattacgacgagcatatttataaatatttttattcagcattacttgatatagtaatattaggcacagtcaaacattcaaccactctcgatacattaactctctcattttctttaacaaattctgcaatatcttcgtaaaaagattcttgaaactttttagaatatctatcgactctagatgaaatagcgttcgtcaacatactatgttttgtatacataaaggcgcccattttaacagtttctagtgacaaaatgctagcgatcctaggatcctttagaatcacatagattgacgattcgtctctcttagtaactctagtaaaataatcatacaatctagtacgcgaaataatattatccttgacttgaggagatctaaacaatctagttttgagaacatcgataagttcatcgggaatgacatacatactatctttaatagaactcttttcatccagttgaatggattcgtccttaaccaactgattaatgagatcttctattttatcattttccagatgatatgtatgtccattaaagttaaattgtgtagcgcttctttttagtctagcagccaatactttaacatcactaatatcgatatacaaaggagatgatttatctatggcattaagaattcgtttttcgacatccgtcaaaaccaattcctttttgcctgtatcatccagttttccatcctttgtaaagaaattattttctactagactattaataagactgataaggattcctccataattgcacaatccaaactttttaacaaaactagactttacgagatctacaggaatgcgtacttcaggttttttagcttgtgattttttcttttgcggacattttctagtaaccaactcatctaccatttcattgattttagcagtgaaataagctttcaatgcacgggcactgatactattgaaaacgagttgatcttcaaattccgccatttaagttcaccaaacaacttttaaatacaaatatatcaatagtagtagaataagaactataaaaaaaataataattaaccaaccccaacaaccggtattattagttgatgtggtagttttctcatcacttagaacagatttaacaatttctataaagtctgtcaaatcatcttccggagaccccataaatacaccaaatatagcggcgtacaacttatccatttatacattgaatattggcttttctttatcgctatcttcatcatattcatcatcaatatcaacaagtcccagattacgagccagatcttcttctacattttcagtcattgatacacgttcactatctccagagagtccgataacgttagccaccacttctctatcaatgattagtttcttgagcgcgaaagtaatttttgtttccgttccggatctatagaagacgataggtgtgataattgccttggccaattgtctttctcttttactgagtgattctagttcaccttctatagatctgagaatggatgattctccagtcgaaacatattctaccatggatccgtttaatttgttgatgaagatggattcatccttaaatgttttctctgtaatagtttccaccgaaagactatgcaaagaatttggaatgcgttccttgtgcttaatgtttccatagacggcttctagaagttgatacaacataggactagccgcggtaacttttatttttagaaagtatccatcgcttctatcttgtttagatttatttttataaagtttagtctctccttccaacataataaaagtggaagtcatttgactagataaactatcagtaagttttatagagatagacgaacaattagcgtattgagaagcatttagtgtaacgtattcgatacattttgcattagatttactaatcgattttgcatactctataacacccgcacaagtctgtagagaatcgctagatgcagtaggtcttggtgaagtttcaactctcttcttgattaccttactcatgattaaacctaaataattgtactttgtaatataatgatatatattttcactttatctcatttgagaataaaaatgtttttgtttaaccactgcatgatgtacagatttcggaatcgcaaaccaccagtggttttattttatccttgtccaatgtgaattgaatgggagcggatgcgggtttcgtacgtagatagtacattcccgtttttagaccgagactccatccgtaaaaatgcatactcgttagtttggaataactcggatctgctatatggatattcatagattgactttgatcgatgaaggctcccctgtctgcagccatttttatgatcgtcttttgtggaatttcccaaatagttttataaactcgcttaatatcttctggaaggtttgtattctgaatggatccaccatctgccataatcctattcttgatctcatcattccataattttctctcggttaaaactctaaggagatgcggattaactacttgaaattctccagacaatactctccgagtgtaaatattactggtatacggttccaccgactcattatttcccaaaatttgagcagttgatgcagtcggcataggtgccaccaataaactatttctaagaccgtatgttctgattttatcttttagaggttcccaattccaaagatccgacggtacaacattccaaagatcatattgtagaataccgttactggcgtacgatcctacatatgtatcgtatggtccttccttctcagctagttcacaactcgcctctaatgcaccgtaataaatggtttcgaagatcttcttatttagatcttgtgcttccaggctatcaaatggataatttaagagaataaacgcgtccgctaatccttgaacaccaataccgataggtctatgtctcttattagagatttcagcttctggaataggataataattaatatctataattttattgagatttctgacaattactttgaccacatccttcagtttgagaaaatcaaatcgcccatctattacaaacatgttcaaggcaacagatgccagattacaaacggctacctcattagcatccgcatattgtattatctcagtgcaaagattactacacttgatagttcctaaattttgttgattactctttttgttacacgcatccttataaagaatgaatggagtaccagtttcaatctgagattctataatcgctttccagacgactcgagcctttattatagatttgtatctcctttctctttcgtatagtgtatacaatcgttcgaactcgtctccccaaacattgtccaatccaggacattcatccggacacatcaacgaccactctccgtcatccttcactcgtttcataaagagatcaggaatccaaagagctataaatagatctctggttctatgttcctcgtttcctgtattctttttaagatcgaggaacgccataatatcagaatgccacggttccaagtatatggccataactccaggccgtttgtttcctccctgatctatgtatctagcggtgttattataaactctcaacattggaataataccgtttgatataccattggtaccggagatatagcttccactggcacgaatattactaattgatagacctattccccctgccattttagagattaatgcgcatcgttttaacgtgtcatagataccctctatgctatcatcgatcatgttaagtagaaaacagctagacatttggtgacgactagttcccgcattaaataaggtaggagaagcgtgcgtaaaccatttttcagaaagtagattgtacgtctcaatagctgagtctatatcccattgatgaattcctactgcgacacgcattaacatgtgctgaggtctttcaacgatcttgttgtttattttcaacaagtaggatttttccaaagttttaaaaccaaaatagttgtatgaaaagtctcgttcgtaaataataaccgagttgagtttatccttatatttgttaactatatccatggtgatacttgaaataatcggagaatgtttcccatttttaggattaacatagttgaataaatcctccatcacttcactaaatagtttttttgtttccttgtgtagatttgatacggctattctggcggctagaatggcataatccggatgttgtgtagtacaagtggctgctatttcggctgccagagtgtccaattctaccgttgttactccattatatattccttgaataaccttcatagctattttaataggatctatatgatccgtgtttaagccataacataattttctaatacgagacgtgattttatcaaacatgacattttccttgtatccatttcgtttaatgacaaacatttttgttggtgtaataaaaaaattatttaacttttcattaatagggatttgacgtatgtagcgtacaaaatgattgttcctggtatatagataaagagtcctatatatttgaaaatcgttacggctcgattaaactttaatgattgcatagtgaatatatcattaggatttaactccttgactatcatggcggcgccagaaattaccatcaaaagcattaatacagttataccgatcgcagttagaacggttatagcatccaccatttatatctaaaaattagatcaaagaatatgtgacaaagtcctagttgtatactgagaattgacgaaacaatgtttcttacatatttttttcttattagtaaccgacttaatagtaggaactggaaaactagacttgattattctataagtatagatacccttccaaataatattctctttgataaaagttccagaaaatgtagaattttttaaaaagttatcttttgctattaccaagattgtgtttagacgcttattattaatatgagtgatgaaatccacaccgcctctagatatcgcctttatttccacattagatggtaaatccaatagtgaaactatctttttaggaatgtatggactcgcgtttagaggagtaaacgtcttaggcgtcggaaaggatgattcatcaaacgaataaacaatttcacaaatggatgttaatgtattagtaggaaattttttgacgctattggaattgaagattctaatggatgatgttctacctatttcatccgataacatgttaatttccgacaccaacggttttaatatttcgatgatatacggtagtctctctttcggacttatatagcttattccacaatacgagtcattatatactccaaaaaacaaaataactagtataaaatctgtatcgaatgggaaaaacgaaattatcgacataggtatagaatccggaacattgaacgtattaatacttaattctttttctgtggtaagtaccgataggttattgacattgtatggttttaaatattctataacttgagacttgatagatattagtgatgaattgaaaattatttttatcaccacgtgtgtttcaggatcatcgtcgacgcccgtcaaccaaccgaacggagtaaaataaatatcattaatatatgctctagatattagtatttttatcaatcctttgattatcatcttctcgtaggcgaatgattccatgatcaagagtgatttaagaacatcctccggagtattaatgggcttagtaaacagtccatcgttgcaataataaaagttatccaagttaaaggatattatgcattcgtttaaagatatcacctcatctgacggagacaattttttggtaggttttagagactttgaagctacttgtttaacaaagttattcatcgtcgtctactattctatttaattttgtagttaatttatcacatatcacattaattgactttttggtccacttttccatacgtttatattcttttaatcctgcgttatccgtttccgttatatccagggatagatcttgcaagttaaatagaatgctcttaaataatgtcattttcttatccgctaaaaatttaaagaatgtataaacctttttcagagatttgaaactcttaggtggtgtcctagtacacaatatcataaacaaactaataaacattccacattcagattccaacagctgattaacttccacattaatacagcctattttcgctccaaatgtacattcgaaaaatctgaataaaacatcgatgtcacaatttgtattatccaatacagaatgtttgtgattcgtgttaaaaccatcggagaaggaatagaaataaaaattattatagtggtggaattcagttggaatattgcctccggagtcataaaaggatactaaacattgttttttatcataaattacacatttccaatgagacaaataacaaaatccaaacattacaaatctagaggtagaacttttaattttgtctttaagtatatacgataagatatgtttattcataaacgcgtcaaatttttcatgaatcgctaaggagtttaagaatctcatgtcaaattgtcctatataatccacttcggatccataagcaaactgagagactaagttcttaatacttcgattgctcatccaggctcctctctcaggctctattttcatcttgacgacctttggattttcaccagtatgtattcctttacgtgataaatcatcgattttcaaatccatttgtgagaagtctatcgccttagatactttttcccgtagtcgaggtttaaaaaaatacgctaacggtatactagtaggtaactcaaagacatcatatatagaatggtaacgcgtctttaactcgtcggttaactctttcttttgatcgagttcgtcgctactattgggtctgctcaggtgccccgactctactagttccaacatcataccgataggaatacaagacactttgccggcggttgtagatttatcatatttttccactacatatccgttacaatttgttaaaaatttagatacatctatattgctacataatccagctagtgaatatatatgacataataaattggtaaatcctagttctggtattttactaattactaaatctgtatatctttccatttatcatggaaaagaatttaccagatatcttcttttttccaaactgcgttaatgtattctcttacaaatattcacaagatgaattcagtaatatgagtaaaacggaacgtgatagtttctcattggccgtgtttccagttataaaacatagatggcataacgcacacgttgtaaaacataaaggaatatacaaagttagtacagaagcacgtggaaaaaaagtatctcctccatcactaggaaaacccgcacacataaacctaaccgcgaagcaatatatatacagtgaacacacaataagctttgaatgttatagttttctaaaatgtataacaaatacagaaatcaattcgttcgatgagtatatattaagaggactattagaagctggtaatagtttacagatattttccaattccgtaggtaaacgaacagatactataggtgtactagggaataagtatccatttagcaaaattccattggcctcattaactcctaaagcacaacgagagatattttcagcgtggatttctcatagacctgtagttttaactggaggaactggagtgggtaagacgtcacaggtacccaagttattgctttggtttaattatttatttggtggattctctactctagataaaatcactgactttcacgaaagaccagtcattctatctcttcctaggatagctttagttagattgcatagcaataccattttaaaatcattgggatttaaggtactagatggatctcctatttctttacggtacggatctataccggaagaattaataaacaaacaaccaaaaaaatatggaattgtattttctacccataagttatctctaacaaaactatttagttatggcactcttattatagacgaagttcatgagcatgatcaaataggagatattattatagcagtagcgagaaagcatcatacgaaaatagattctatgtttttaatgactgccacgttagaggatgacagggaacggctaaaagtatttttacctaatcccgcatttatacatattcctggagatacactgtttaaaattagcgaggtatttattcataataagataaatccatcttccagaatggcatacatagaagaagaaaagagaaatttagttactgctatacagatgtatactcctcctgatggatcatccggtatagtctttgtggcatccgttgcacagtgtcacgaatataaatcatatttagaaaaaagattaccgtatgatatgtatattattcatggtaaggtcttagatatagacgaaatattagaaaaagtgtattcatcacctaatgtatcgataattatttctactccttatttggaatccagcgttactatacgcaatgttacacacatttatgatatgggtagagtttttgtccccgctccttttggaggatcgcaacaatttatttctaaatctatgagagatcaacgaaaaggaagagtaggaagagttaatcctggtacatacgtctatttctatgatctgtcttatatgaagtctatacagcgaatagattcagaatttctacataattatatattgtacgctaataagtttaatctaacactccccgaagatttgtttataatccctacaaatttggatattctatggcgtacaaaggaatatatagactcgttcgatattagtacagaaacatggaataaattattatccaattattatatgaagatgatagagtatgctaaactttatgtactaagtcctattctcgctgaggagttggataactttgagaggacgggagaattaactagtattgtacgagaagccattttatctctaaatttacaaattaagattttaaattttaaacataaagatgatgatacgtatatacacttttgtaaaatattattcggtgtctataacggaacaaacgctactatatattatcatagacctctaacgggatatatgaatatgatttcagatactatatttgttcctgtagataataactaaaaatcaaactctaatgaccacatctttttttagagatgaaaaattttccacatctccttttgtagacacgactaaacattttgcagaaaaaagtttattagtgtttagataatcgtatacttcatcagtgtagatagtaaatgtgaacagataaaaggtattcttgctcaatagattggtaaattccatagaatatattaatcctttcttcttgagatcccacatcatttcaaccagagacgttttatccaatgatttacctcgtactataccacatacaaaactagattttgcagtgacgtcgtacctggtattcctaccaaacaaaattttacttttagttcttttagaaaattctaaggtagaatctctatttgccaatatgtcatctatggaattaccactagcaaaaaatgatagaaatatatattgatacatcgcagctggttttgatctactatactttaaaaacgaatcagattccataattgcctgtatatcatcagctgaaaaactatgttttacacgtattccttcggcatttctttttaatgatatatcttgtttagacaatgataaagttatcatgtccatgagagacgcgtctccgtatcgtataaatatttcattagatgttagacgcttcattaggggtatacttctataaggtttcttaatcagtccatcattggttgcgtcaagaactactatcggatgttgttgggtatctctagtgttacacatggccttactaaagtttgggtaaataactatgatatctctattaattatagatgcatatatttcattcgtcaaggatattagtatcgacttgctatcgtcattaatacgtgtaatgtaatcatataaatcatgcgatagccaaggaaaatttaaatagatgttcatcatataatcgtcgctataattcatattaatacgttgacattgactaatttgtaatatagcctcgccacgaagaaagctctcgtattcagtttcatcgataaaggataccgttaaatataactggttgccgatagtctcatagtctattaagtggtaagtttcgtacaaatacagaatccctaaaatattatctaatgttggattaatctttaccataactgtataaaatggagacggagtcataactattttaccgtttgtacttactggaatagatgaaggaataatctccggacatgctggtaaagacccaaatgtctgtttgaagaaatccaatgttccaggtcctaatctcttaacaaaaattacgatattcgatcccgatatcctttgcattctatttaccagcatatcacgaactatattaagattatctatcatgtctattctcccaccgttatataaatcgcctccgctaagaaacgttagtatatccatacaatggaatacttcatttctaaaatagtattcgttttctaattctttaatgtgaaatcgtatactagaaagggaaaaattatctttgagttttccgttagaaaagaaccacgaaactaatgttctgattgcgtccgattccgttgctgaattaatggatttacaccaaaaactcatataacttctagatgtagaagcattcgctaaaaaattagtagaatcaaaggatataagtagatgttccaacaagtgagcaattcccaagatttcatctatatcattctcgaatccgaaattagaaattcccaagtagatatcctttttcatccgatcgttgatgaaaatacgaactttattcggtaagacaatcatttactaaggagtaaaataggaagtaatgttcgtatgtcgttatcatcgtataaattaaaggtgtgttttttaccattaagtgacattataattttaccaatattggaattataatataggtgtatttgcgcactcgcgacggttgatgcatcggtaaatatagctgtatctaatgttctagtcggtatttcatcatttcgctgtctaataatagcgttttctctatctgtttccattacagctgcctgaagtttattggtcggataatatgtaaaataataagaaatacatacgaataacaaaaataaaataagatataataaagatgccatttagagatctaattttgtttaacttgtccaaattcctacttacagaagatgaggaatcgttggagatagtgtcttccttatgtagaggatttgaaatatcttataatgacttgataacttactttccagataggaaataccataaatatatttataaagtatttgaacatgtagatttatcggaggaattaagtatggaattccatgatacaactctgagagatttagtctatcttagattgtacaagtattccaagtgtatacggccgtgttataaattaggagataatctaaaaggcatagttgttataaaggacaggaatatttatattagggaagcaaatgatgacttgatagaatatctcctcaaggaatacactcctcagatttatacatattctaatgagcgcgtccccataactggttcaaaattaattctttgtggattttctcaagttacatttatggcgtatacaacgtcgcatataacaacaaataaaaaggtagatgttctcgtttccaaaaaatgtatagatgaactagtcgatccaataaattatcaaatacttcaaaatttatttgataaaggaagcggaacaataaacaaaatactcaggaagatattttattcggtaacaggtggccaaactccataggtagctttttctatttcggattttagaatttccaaattcaccagcgatttatcggttttggtgaaatccaaggatttattaatgtccacaaatgccatttgttttgtctgtggattgtatttgaaaatggaaacgatgtagttagatagatgcgctgcgaagtttcctattagggttccgcgcttcacgtcacccagcatacttgaatcaccatcctttaaaaaaaatgataagatatcaacatggagtatatcatactcgaattttaattcttctactgactcactgacattttcacaaatactacaatacggtttaccgaaaataatcagtacgttcttcatttatgggtatcaaaaacttaaaatcgttactgctggaaaataaatcactgacgatattagatgataatttatacaaagtatacaatggaatatttgtggatacaatgagtatttatatagccgtcgccaattgtgtcagaaacttagaagagttaactacggtattcataaaatacgtaaacggatgggtaaaaaagggagggcatgtaaccctttttatcgatagaggaagtataaaaattaaacaagacgttagagacaagagacgtaaatattctaaattaaccaaggacagaaaaatgttagaattagaaaagtgtacatccgaaatacaaaatgttaccggatttatggaagaagaaataaaggcagaaatgcaattaaaaatcgataaactcacatttcaaatatatttatctgattctgataacataaaaatatcattgaatgagatactaacacatttcaacaataatgagaatgttacattattttattgtgatgaacgagacgcagaattcgttatgtgtctcgaggctaaaacacatttctctaccacaggagaatggccgttgataataagtaccgatcaggatactatgctatttgcatctgctgataatcatcctaagatgataaaaaacttaactcaactgtttaaatttgttccctcggcagaggataactatttagcaaaattaacggcgttagtgaatggatgtgatttctttcctggactctatggggcatctataacacccaccaacttaaacaaaatacaattgtttagtgattttacaatcgataatatagtcactagtttggcaattaaaaattattatagaaagactaactctaccgtagacgtgcgtaatattgttacgtttataaacgattacgctaatttagacgatgtctactcgtatattcctccttgtcaatgcactgttcaagaatttatattttccgcattagatgaaaaatggaatgaatttaaatcatcttatttagaaagcgtgccgttaccctgccaattaatgtacgcgttagaaccacgcaaggagattgatgtttcagaagttaaaactttatcatcttatatagatttcgaaaatactaaatcagatatcgatgttataaaatctatatcctcgatcttcggatattctaacgaaaactgtaacacgatagtattcggcatctataaggataatttactactgagtataaataattcattttactttaacgatagtctgttaataaccaatactaaaagtgataatataataaatataggttactagattaaaaatggtgttccaactcgtgtgctctacatgcggtaaagatatttctcacgaacgatataaattgattatacgaaaaaaatcattaaaggatgtactcgtcagtgtaaagaacgaatgttgtaggttaaaattatctacacaaatagaacctcaacgtaacttaacagtgcaacctctattggatataaactaatatggatccggttaattttatcaagacatatgcgcctagaggttctattatttttattaattataccatgtcattaacaagtcatttgaatccatcgatagaaaaacatgtgggtatttattatggtacgttattatcggaacacttggtagttgaatctacctatagaaaaggagttcgaatagtcccattggatagtttttttgaaggatatcttagtgcaaaagtatacatgttagagaatattcaagttatgaaaatagcagctgatacgtcattaactttattgggtattccgtatggatttggtcatgatagaatgtattgttttaaattggtagctgactgttataaaaatgccggtattgatacatcgtctaaacgaatattgggcaaagatatttttctgagccaaaacttcacagacgataatagatggataaagatatatgattctaataatttaacattttggcaaattgattaccttaaagggtgagttaatatgcataactactcctccgttgttttttccctcgttctttttcttaacgttgtttgccatcactctcataatgtaaagatattctaaaatggtaaacttttgcatatcggacgcagaaattggtataaatgttgtaattgtattatttcccgtcaatggactagtcacagctccatcagttttatatcctttagagtatttctcactcgtgtctaacattctagagcattccatgatctgtttatcgttgatattggccggaaagatagattttttattttttattatattactattggcaattgtagatataacttctggtaaatatttttctaccttttcaatctcttctattttcaagccggctatatattctgctatattgttgctagtatcaataccttttctggctaagaagtcatatgtggtattcactatatcagttttaactggtagttccattagcctttccacttctgcagaataatcagaaattggttctttaccagaaaatccagctactataataggctcaccgatgatcattggcaaaatcctatattgtaccagattaatgagagcatatttcatttccaataattctgctagttcttgagacattgatttatttgatgaatctagttggttctctagatactctaccatttctgccgcatacaataacttgttagataaaatcagggttatcaaagtgtttagcgtggctagaatagtgggcttgcatgtattaaagaatgcggtagtatgagtaaaccgttttaacgaattatatagtctccagaaatctgtggcgttacatacatgagccgaatgacatcgaagattgtccaatatttttaatagctgctctttgtccattatttctatatttgactcgcaacaattgtagataccattaatcaccgattcctttttcgatgccggacaatagcacaattgtttagctttggactctatgtattcagaattaatagatatatctctcaatacagattgcactatacattttgaaactatgtcaaaaattgtagaacgacgctgttctgcagccatttaactttaaataatttacaaaaatttaaaatgagcatccgtataaaaatcgataaactgcgccaaattgtggcatatttttcagagttcagtgaagaagtgtctataaatgtagactcgacggatgagttaatgtatatttttgccgccttgggcggatctgtaaacatttgggcaattatacctctaagtgcatcagtgttttaccgaggagccgaaaatattgtgtttaatcttcctgtgtccaaggtaaaatcgtgtttgtgtagttttcacaatgatgccatcatagatatagaacctgatctggaaaataatctagtaaaactttctagttatcatgtagtaagtgtcgattgtaacaaggaactgatgcctattaggacagatactactatttgtctaagtatagatcaaaagaaatcttacgtgtttaattttcacaagtatgaagaaaaatgttgtggtagaaccgtcattcatctagaatggttgttgggctttatcaagtgtattagtcagcatcagcatctggctattatgtttaaagatgacaatattattatgaagactcctggtaatactgatgcgttttccagggaatattctatgactgaatgttctcaagaactacaaaagttttctttcaaaatagctatctcgtctctcaacaaactacgaggattcaaaaagagagtcaatgtttttgaaactagaatcgtaatggataatgacgataacattttaggaatgttgttttcggatagagttcaatcctttaagatcaacatctttatggcgtttttagattaatactttcaatgagataaatatgggtggcggagtaagtgttgagctccctaaacgggatccgcctccgggagtacccactgatgagatgttattaaacgtggataaaatgcatgacgtgatagctcccgctaagcttttagaatatgtgcatataggaccactagcaaaagataaagaggataaagtaaagaaaagatatccagagtttagattagtcaacacaggacccggtggtctttcggcattgttaagacaatcgtataatggaaccgcacccaattgctgtcgcacttttaatcgtactcattattggaagaaggatggaaagatatcagataagtatgaagagggtgcagtattagaatcgtgttggccagacgttcacgacactggaaaatgcgatgttgatttattcgactggtgtcagggggatacgttcgatagaaacatatgccatcagtggatcggttcagcctttaataggagtaatagaactgtagagggtcaacaatcgttaataaatctgtataataagatgcaaacattatgtagtaaagatgctagtgtaccaatatgcgaatcatttttgcattatttacgcgcacacaatacagaagatagcaaagagatgatcgattatattctaagacaacagtctgcggactttaaacagaaatatatgagatgtagttatcccactagagataagttagaagagtcattaaaatatgcggaacctcgagaatgttgggatccagagtgttcgaatgccaatgttaatttcttactaacacgtaattataataatttaggactttgcaatattgtacgatgtaataccagcgtgaacaacttacagatggataaaacttcctcattaagattgtcatgtggattaagcaatagtgatagattttctactgttcccgtcaatagagcaaaagtagttcaacataatattaaacactcgttcgacctaaaattgcatttgatcagtttattatctctcttggtaatatggatactaattgtagctatttaaatgggtgccgcggcaagcatacagacgacggtgaatacactcagcgaacgtatctcgtctaaattagaacaagaagcgaacgctagtgctcaaacaaaatgtgatatagaaatcggaaatttttatatccgacaaaaccatggatgtaacctcactgttaaaaatatgtgctctgcggacgcggatgctcagttggatgctgtgttatcagccgctacagaaacatatagtggattaacaccggaacaaaaagcatacgtgccagctatgtttactgctgcgttaaacattcagacgagtgtaaacactgttgttagagattttgaaaattatgtgaaacagacttgtaattctagcgcggtcgtcgataacaaattaaagatacaaaacgtaatcatagatgaatgttacggagccccaggatctccaacaaatttggaatttattaatacaggatctagcaaaggaaattgtgccattaaagcgttgatgcaattgacgactaaggccactactcaaatagcacctagacaagttgctggtacaggagttcagttttatatgattgttatcggtgttataatattggcagcgttgtttatgtactatgccaagcgtatgttgttcacatccaccaatgataaaatcaaacttattttagccaataaggaaaacgtccattggactacttacatggacacattctttagaacttctccgatggttattgctaccacggatatgcaaaactgaaaatatattgataatattttaatagattaacatggaagttatcgctgatcgtctagacgatatagtgaaacaaaatatagcggatgaaaaatttgtagattttgttatacacggtctagagcatcaatgtcctgctatacttcgaccattaattaggttgtttattgatatactattatttgttatagtaatttatatttttacggtacgtctagtaagtagaaattatcaaatgttgttggtggtgctagtcatcacattaactattttttattactttatactataatagtactagactgacttctaacaaacatctcacctgccataaataaatgcttgatattaaagtcttctatttctaacactattccatctgtggaaaataatactctgacattatcgctaattgacacatcggtgagtgatatgcctataaagtaataatcttctttgggcacatataccagtgtaccaggttctaacaacctatttactggtgctcctgtagcatactttttctttaccttgagaatatccatcgtttgcttggtcaatagcgatatgtgattttttatcaaccactcaaaaaagtaattggagtgttcatatcctctacgggctattgtctcatggccgtgtatgaaatttaagtaacacgactgtggtagatttgttctatagagccgattgccgcaaatagatagaactaccaatatgtctgtacaaatgttaaacattaattgattaacagaaaaaacaatgttcgttctgggaatagaaaccagatcaaaacaaaattcgttagaatatatgccacgtttatacatggaatataaaataactacagtttgaaaaataacagtatcatttaaacatttaacttgcggggttaatctcacaactttactgtttttgaactgttcaaaatatagcatcgatccgtgagaaatacgtttagccgcctttaatagaggaaatcccaccgcctttctggatctcaccaacgacgatagttctgaccagcaactcatttcttcatcatccacctgttttaacatataataggcaggagatagatatccgtcattgcaatattccttctcgtaggcacacaatctaatattgataaaatctccattctcttctctgcatttattatcttgtctcggtggctgattaggctgtggtcttggtttaggccttggtctatcgttgttgaatctattttggtcattaaatctttcatttcttcctggtatatttctatcacctcgtttggttggatttttgtctatattatcgtttgtaacatcggtacgggtattcatttatcacaaaaaaaacttctctaaatgagtctactgctagaaaacctcatcgaagaagataccatattttttgcaggaagtatatctgagtatgatgatttacaaatggttattgccggcgcaaaatccaaatttccaagatctatgctttctatttttaatatagtacctagaacgatgtcaaaatatgagttggagttgattcataacgaaaatatcacaggagcaatgtttaccacaatgtataatataagaaacaatttgggtctaggagatgataaactaactattgaagccattgaaaactatttcttggatcctaacaatgaagttatgcctcttattattaataatacggatatgactgccgtcattcctaaaaaaagtggtaggagaaagaataagaacatggttatcttccgtcaaggatcatcacctatcttgtgcattttcgaaactcgtaaaaagattaatatttataaagaaaatatggaatccgcgtcgactgagtatacacctatcggagacaacaaggctttgatatctaaatatgcgggaattaatgtcctgaatgtgtattctccttccacatccataagattgaatgccatttacggattcaccaataaaaataaactagagaaacttagtactaataaggaactagaatcgtatagttctagccctcttcaagaacccattaggttaaatgattttctgggactattggaatgtgttaaaaagaatattcctctaacagatattccgacaaaggattgattactataaatggagaatgttcctaatgtatactttaatcctgtgtttatagagcccacgtttaaacattctttattaagtgtttataaacacagattaatagttttatttgaagtattcgttgtattcattctaatatatgtattttttagatctgaattaaatatgttcttcatgcctaaacgaaaaatacccgatcctattgatagattacgacgtgctaatctagcgtgtgaagacgataaattaatgatctatggattaccatggatgacaactcaaacatctgcgttatcaataaatagtaaaccgatagtgtataaagattgtgcaaagcttttgcgatcaataaatggatcacaaccagtatctcttaacgatgttcttcgcagatgatgattcattttttaagtatttggctagtcaagatgatgaatcttcattatctgatatattgcaaatcactcaatatctagactttctgttattattattgatccaatcaaaaaataaattagaagctgtgggtcattgttatgaatctctttcagaggaatacagacaattgacaaaattcacagactttcaagattttaaaaaactgtttaacaaggtccctattgttacagatggaagggtcaaacttaataaaggatatttgttcgactttgtgattagtttgatgcgattcaaaaaagaatcctctctagctaccaccgcaatagatcctgttagatacatagatcctcgtcgcaatatcgcattttctaacgtgatggatatattaaagtcgaataaagtgaacaataattaattctttattgtcatcatgaacggcggacatattcagttgataatcggccccatgttttcaggtaaaagtacagaattaattagacgagttagacgttatcaaatagctcaatataaatgcgtgactataaaatattctaacgataatagatacggaacgggactatggacgcatgataagaataattttgaagcattggaagcaactaaactatgtgatgtcttggaatcaattacagatttctccgtgataggtatcgatgaaggacagttctttccagacattgttgaattagatcgataaaaattaattaattacccgggtaccaggcctagatctgtcgagatccggtggtggtgcaaatcaaagaactgctcctcagtggatgttgcctttacttctaggcctgtacggaagtgttacttctgctctaaaagctgctgcagggggggggggggggtgggggggccggttagggccgccatcccctcagagcgtcgggatatcgggtggcggctcgggacggaggacgcgctagtgttcttctgtgtggcagttcagaatgatggatcaagctagatcagcattctctaacttgtttggtggagaaccattgtcatatacccggttcagcctggctcggcaagtagatggcgataacagtcatgtggagatgaaacttgctgtagatgaagaagaaaatgctgacaataacacaaaggccaatgtcacaaaaccaaaaaggtgtagtggaagtatctgctatgggactattgctgtgatcgtctttttcttgattggatttatgattggctacttgggctattgtaaaggggtagaaccaaaaactgagtgtgagagactggcaggaaccgagtctccagtgagggaggagccaggagaggacttccctgcagcacgtcgcttatattgggatgacctgaagagaaagttgtcggagaaactggacagcacagacttcaccagcaccatcaagctgctgaatgaaaattcatatgtccctcgtgaggctggatctcaaaaagatgaaaatcttgcgttgtatgttgaaaatcaatttcgtgaatttaaactcagcaaagtctggcgtgatcaacattttgttaagattcaggtcaaagacagcgctcaaaactcggtgatcatagttgataagaacggtagacttgtttacctggtggagaatcctgggggttatgtggcgtatagtaaggctgcaacagttactggtaaactggtccatgctaattttggtactaaaaaagattttgaggatttatacactcctgtgaatggatctatagtgattgtcagagcagggaaaatcacctttgcagaaaaggttgcaaatgctgaaagcttaaatgcaattggtgtgttgatatacatggaccagactaaatttcccattgttaacgcagaactttcattctttggacatgctcatctggggacaggtgacccttacacacctggattcccttccttcaatcacactcagtttccaccatctcggtcatcaggattgcctaatatacctgtccagacaatctccagagctgctgcagaaaagctgtttgggaatatggaaggagactgtccctctgactggaaaacagactctacatgtaggatggtaacctcagaaagcaagaatgtgaagctcactgtgagcaatgtgctgaaagagataaaaattcttaacatctttggagttattaaaggctttgtagaaccagatcactatgttgtagttggggcccagagagatgcatggggccctggagctgcaaaatccggtgtaggcacagctctcctattgaaacttgcccagatgttctcagatatggtcttaaaagatgggtttcagcccagcagaagcattatctttgccagttggagtgctggagactttggatcggttggtgccactgaatggctagagggatacctttcgtccctgcatttaaaggctttcacttatattaatctggataaagcggttcttggtaccagcaacttcaaggtttctgccagcccactgttgtatacgcttattgagaaaacaatgcaaaatgtgaagcatccggttactgggcaatttctatatcaggacagcaactgggccagcaaagttgagaaactcactttagacaatgctgctttccctttccttgcatattctggaatcccagcagtttctttctgtttttgcgaggacacagattatccttatttgggtaccaccatggacacctataaggaactgattgagaggattcctgagttgaacaaagtggcacgagcagctgcagaggtcgctggtcagttcgtgattaaactaacccatgatgttgaattgaacctggactatgagaggtacaacagccaactgctttcatttgtgagggatctgaaccaatacagagcagacataaaggaaatgggcctgagtttacagtggctgtattctgctcgtggagacttcttccgtgctacttccagactaacaacagatttcgggaatgctgagaaaacagacagatttgtcatgaagaaactcaatgatcgtgtcatgagagtggagtatcacttcctctctccctacgtatctccaaaagagtctcctttccgacatgtcttctggggctccggctctcacacgctgccagctttactggagaacttgaaactgcgtaaacaaaataacggtgcttttaatgaaacgctgttcagaaaccagttggctctagctacttggactattcagggagctgcaaatgccctctctggtgacgtttgggacattgacaatgagttttaaatgtgatacccatagcttccatgagaacagcagggtagtctggtttctagacttgtgctgatcgtgctaaattttcagtagggctacaaaacctgatgttaaaattccatcccatcatcttggtactactagatgtctttaggcagcagcttttaatacagggtagataacctgtacttcaagttaaagtgaataaccacttaaaaaatgtccatgatggaatattcccctatctctagaattttaagtgctttgtaatgggaactgcctctttcctgttgttgttaatgaaaatgtcagaaaccagttatgtgaatgatctctctgaatcctaagggctggtctctgctgaaggttgtaagtggtcgcttactttgagtgatcctccaacttcatttgatgctaaataggagataccaggttgaaagaccttctccaaatgagatctaagcctttccataaggaatgtagctggtttcctcattcctgaaagaaacagttaactttcagaagagatgggcttgttttcttgccaatgaggtctgaaatggaggtccttctgctggataaaatgaggttcaactgttgattgcaggaataaggccttaatatgttaacctcagtgtcatttatgaaaagaggggaccagaagccaaagacttagtatattttcttttcctctgtcccttcccccataagcctccatttagttctttgttatttttgtttcttccaaagcacattgaaagagaaccagtttcaggtgtttagttgcagactcagtttgtcagactttaaagaataatatgctgccaaattttggccaaagtgttaatcttaggggagagctttctgtccttttggcactgagatatttattgtttatttatcagtgacagagttcactataaatggtgtttttttaatagaatataattatcggaagcagtgccttccataattatgacagttatactgtcggttttttttaaataaaagcagcatctgctaataaaacccaacagatactggaagttttgcatttatggtcaacacttaagggttttagaaaacagccgtcagccaaatgtaattgaataaagttgaagctaagatttagagatgaattaaatttaattaggggttgctaagaagcgagcactgaccagataagaatgctggttttcctaaatgcagtgaattgtgaccaagttataaatcaatgtcacttaaaggctgtggtagtactcctgcaaaattttatagctcagtttatccaaggtgtaactctaattcccattttgcaaaatttccagtacctttgtcacaatcctaacacattatcgggagcagtatcttccataatgtataaagaacaaggtagtttttacctaccacagtgtctgtatcggagacagtgatctccatatgttacactaagggtgtaagtaattatcgggaacagtgtttcccataattttcttcatgcaatgacatcttcaaagcttgaagatcgttagtatctaacatgtatcccaactcctataattccctatcttttagttttagttgcagaaacattttgtggtcattaagcattgggtgggtaaattcaaccactgtaaaatgaaattactacaaaatttgaaatttagcttgggtttttgttacctttatggtttctccaggtcctctacttaatgagatagtagcatacatttataatgtttgctattgacaagtcattttaactttatcacattatttgcatgttacctcctataaacttagtgcggacaagttttaatccagaattgaccttttgacttaaagcagagggactttgtatagaaggtttgggggctgtggggaaggagagtcccctgaaggtctgacacgtctgcctacccattcgtggtgatcaattaaatgtaggtatgaataagttcgaagctccgtgagtgaaccatcattataaacgtgatgatcagctgtttgtcatagggcagttggaaacggcctcctagggaaaagttcatagggtctcttcaggttcttagtgtcacttacctagatttacagcctcacttgaatgtgtcactactcacagtctctttaatcttcagttttatctttaatctcctcttttatcttggactgacatttagcgtagctaagtgaaaaggtcatagctgagattcctggttcgggtgttacgcacacgtacttaaatgaaagcatgtggcatgttcatcgtataacacaatatgaatacagggcatgcattttgcagcagtgagtctcttcagaaaacccttttctacagttagggttgagttacttcctatcaagccagtacgtgctaacaggctcaatattcctgaatgaaatatcagactagtgacaagctcctggtcttgagatgtcttctcgttaaggagatgggccttttggaggtaaaggataaaatgaatgagttctgtcatgattcactattctagaacttgcatgacctttactgtgttagctctttgaatgttcttgaaattttagactttctttgtaaacaaatgatatgtccttatcattgtataaaagctgttatgtgcaacagtgtggagattccttgtctgatttaataaaatacttaaacactgaaaaaaaaaaaaaaaaaaaaaaaaaaaaaaaaaaaaaaaaaaaaaaaaaaaaaaaaaaaaaaaaaaaaaaaaaaaaaaaaagtaccttctgaggcggaaagaaccagccggatctcgacttcgagcttatttatattccaaaaaaaaaaaataaaatttcaatttttaagctttcactaattccaaacccacccgctttttatagtaagtttttcacccataaataataaatacaataattaatttctcgtaaaagtagaaaatatattctaatttattgcacggtaaggaagtagatcataactcgagcatgggagatcccgtcgttttacaacgtcgtgactgggaaaaccctggcgttacccaacttaatcgccttgcagcacatccccctttcgccagctggcgtaatagcgaagaggcccgcaccgatcgcccttcccaacagttgcgcagcctgaatggcgaatggcgctttgcctggtttccggcaccagaagcggtgccggaaagctggctggagtgcgatcttcctgaggccgatactgtcgtcgtcccctcaaactggcagatgcacggttacgatgcgcccatctacaccaacgtgacctatcccattacggtcaatccgccgtttgttcccacggagaatccgacgggttgttactcgctcacatttaatgttgatgaaagctggctacaggaaggccagacgcgaattatttttgatggcgttaactcggcgtttcatctgtggtgcaacgggcgctgggtcggttacggccaggacagtcgtttgccgtctgaatttgacctgagcgcatttttacgcgccggagaaaaccgcctcgcggtgatggtgctgcgctggagtgacggcagttatctggaagatcaggatatgtggcggatgagcggcattttccgtgacgtctcgttgctgcataaaccgactacacaaatcagcgatttccatgttgccactcgctttaatgatgatttcagccgcgctgtactggaggctgaagttcagatgtgcggcgagttgcgtgactacctacgggtaacagtttctttatggcagggtgaaacgcaggtcgccagcggcaccgcgcctttcggcggtgaaattatcgatgagcgtggtggttatgccgatcgcgtcacactacgtctgaacgtcgaaaacccgaaactgtggagcgccgaaatcccgaatctctatcgtgcggtggttgaactgcacaccgccgacggcacgctgattgaagcagaagcctgcgatgtcggtttccgcgaggtgcggattgaaaatggtctgctgctgctgaacggcaagccgttgctgattcgaggcgttaaccgtcacgagcatcatcctctgcatggtcaggtcatggatgagcagacgatggtgcaggatatcctgctgatgaagcagaacaactttaacgccgtgcgctgttcgcattatccgaaccatccgctgtggtacacgctgtgcgaccgctacggcctgtatgtggtggatgaagccaatattgaaacccacggcatggtgccaatgaatcgtctgaccgatgatccgcgctggctaccggcgatgagcgaacgcgtaacgcgaatggtgcagcgcgatcgtaatcacccgagtgtgatcatctggtcgctggggaatgaatcaggccacggcgctaatcacgacgcgctgtatcgctggatcaaatctgtcgatccttcccgcccggtgcagtatgaaggcggcggagccgacaccacggccaccgatattatttgcccgatgtacgcgcgcgtggatgaagaccagcccttcccggctgtgccgaaatggtccatcaaaaaatggctttcgctacctggagagacgcgcccgctgatcctttgcgaatacgcccacgcgatgggtaacagtcttggcggtttcgctaaatactggcaggcgtttcgtcagtatccccgtttacagggcggcttcgtctgggactgggtggatcagtcgctgattaaatatgatgaaaacggcaacccgtggtcggcttacggcggtgattttggcgatacgccgaacgatcgccagttctgtatgaacggtctggtctttgccgaccgcacgccgcatccagcgctgacggaagcaaaacaccagcagcagtttttccagttccgtttatccgggcaaaccatcgaagtgaccagcgaatacctgttccgtcatagcgataacgagctcctgcactggatggtggcgctggatggtaagccgctggcaagcggtgaagtgcctctggatgtcgctccacaaggtaaacagttgattgaactgcctgaactaccgcagccggagagcgccgggcaactctggctcacagtacgcgtagtgcaaccgaacgcgaccgcatggtcagaagccgggcacatcagcgcctggcagcagtggcgtctggcggaaaacctcagtgtgacgctccccgccgcgtcccacgccatcccgcatctgaccaccagcgaaatggatttttgcatcgagctgggtaataagcgttggcaatttaaccgccagtcaggctttctttcacagatgtggattggcgataaaaaacaactgctgacgccgctgcgcgatcagttcacccgtgcaccgctggataacgacattggcgtaagtgaagcgacccgcattgaccctaacgcctgggtcgaacgctggaaggcggcgggccattaccaggccgaagcagcgttgttgcagtgcacggcagatacacttgctgatgcggtgctgattacgaccgctcacgcgtggcagcatcaggggaaaaccttatttatcagccggaaaacctaccggattgatggtagtggtcaaatggcgattaccgttgatgttgaagtggcgagcgatacaccgcatccggcgcggattggcctgaactgccagctggcgcaggtagcagagcgggtaaactggctcggattagggccgcaagaaaactatcccgaccgccttactgccgcctgttttgaccgctgggatctgccattgtcagacatgtataccccgtacgtcttcccgagcgaaaacggtctgcgctgcgggacgcgcgaattgaattatggcccacaccagtggcgcggcgacttccagttcaacatcagccgctacagtcaacagcaactgatggaaaccagccatcgccatctgctgcacgcggaagaaggcacatggctgaatatcgacggtttccatatggggattggtggcgacgactcctggagcccgtcagtatcggcggaattccagctgagcgccggtcgctaccattaccagttggtctggtgtcaaaaataataataaccgggcaggggggatccaattctgtgagcgtatggcaaacgaaggaaaaatagttatagtagccgcactcgatgggacatttcaacgtaaaccgtttaataatattttgaatcttattccattatctgaaatggtggtaaaactaactgctgtgtgtatgaaatgctttaaggaggcttccttttctaaacgattgggtgaggaaaccgagatagaaataataggaggtaatgatatgtatcaatcggtgtgtagaaagtgttacatcgactcataatattatattttttatctaaaaaactaaaaataaacattgattaaattttaatataatacttaaaaatggatgttgtgtcgttagataaaccgtttatgtattttgaggaaattgataatgagttagattacgaaccagaaagtgcaaatgaggtcgcaaaaaaactgccgtatcaaggacagttaaaactattactaggagaattattttttcttagtaagttacagcgacacggtatattagatggtgccaccgtagtgtatataggatctgctcccggtacacatatacgttatttgagagatcatttctataatttaggagtgatcatcaaatggatgctaattgacggccgccatcatgatcctattttaaatggattgcgtgatgtgactctagtgactcggttcgttgatgaggaatatctacgatccatcaaaaaacaactgcatccttctaagattattttaatttctgatgtgagatccaaacgaggaggaaatgaacctagtacggcggatttactaagtaattacgctctacaaaatgtcatgattagtattttaaaccccgtggcgtctagtcttaaatggagatgcccgtttccagatcaatggatcaaggacttttatatcccacacggtaataaaatgttacaaccttttgctccttcatattcagctgaaatgagattattaagtatttataccggtgagaacatgagactgactcgagttaccaaattagacgctgtaaattatgaaaaaaagatgtactaccttaataagatcgtccgtaacaaagtagttgttaactttgattatcctaatcaggaatatgactattttcacatgtactttatgctgaggaccgtgtactgcaataaaacatttcctactactaaagcaaaggtactatttctacaacaatctatatttcgtttcttaaatattccaacaacatcaactgaaaaagttagtcatgaaccaatacaacgtaaaatatctagcaaaaattctatgtctaaaaacagaaatagcaagagatccgtacgcggtaataaatagaaacgtactactgagatatactaccgatatagagtataatgatttagttactttaataaccgttagacataaaattgattctatgaaaactgtgtttcaggtatttaacgaatcatccataaattatactccggttgatgatgattatggagaaccaatcattataacatcgtatcttcaaaaaggtcataacaagtttcctgtaaattttctatacatagatgtggtaatatctgacttatttcctagctttgttagactagatactacagaaactaatatagttaatagtgtactacaaacaggcgatggtaaaaagactcttcgtcttcccaaaatgttagagacggaaatagttgtcaagattctctatcgccctaatataccattaaaaattgttagatttttccgcaataacatggtaactggagtagagatagccgatagatctgttatttcagtcgctgattaatcaattagtagagatgagataagaacattataataatcaataatatatcttatatcttatatcttatatcttatatcttgtttagaaaaatgctaatattaaaatagctaacgctagtaatccaatcggaagccatttgatatctataatagggtatctaatttcctgatttaaatagcggacagctatattctcggtagctactcgtttggaatcacaaacattatttacatctaatttactatctgtaatggaaacgtttcccaatgaaatggtacaatccgatacattgcattttgttatatttttttttaaagaggctggtaacaacgcatcgcttcgtttacatggctcgtaccaacaataatagggtaatcttgtatctattcctatccgtactatgcttttatcaggataaatacatttacatcgtatatcgtctttgttagcatcacagaatgcataaatttgttcgtccgtcatgataaaaatttaaagtgtaaatataactattatttttatagttgtaataaaaagggaaatttgattgtatactttcggttctttaaaagaaactgacttgataaaaatggctgtaatctctaaggttacgtatagtctatatgatcaaaaagagattaatgctacagatattatcattagtcatgttaaaaatgacgacgatatcggtaccgttaaagatggtagactaggtgctatggatggggcattatgtaagacttgtgggaaaacggaattggaatgtttcggtcactggggtaaagtaagtatttataaaactcatatagttaagcctgaatttatttcagaaattattcgtttactgaatcatatatgtattcactgcggattattgcgttcacgagaaccgtattccgacgatattaacctaaaagagttatcgggacacgctcttaggagattaaaggataaaatattatccaagaaaaagtcatgttggaacagtgaatgtatgcaaccgtatcaaaaaattactttttcaaagaaaaaggtttgtttcgtcaacaagttggatgatattaacgttcctaattctctcatctatcaaaagttaatttctattcatgaaaagttttggccattattagaaattcatcaatatccagctaacttattttatacagactactttcccatccctccgttgattattagaccggctattagtttttggatagatagtatacccaaagagaccaatgaattaacttacttattaggtatgatcgttaagaattgtaacttgaatgctgatgaacaggttatccagaaggcggtaatagaatacgatgatattaaaattatttctaataacactaccagtatcaatttatcatatattacatccggcaaaaataatatgattagaagttatatcgtcgcccgacgaaaagatcagaccgctagatctgtaattggtcccagtacatctatcaccgttaatgaggtaggaatgcccgcatatattagaaatacacttacagaaaagatatttgttaatgcctttacagtggataaagttaaacaactattagcgtcaaaccaagttaaattttactttaataaacgattaaaccaattaacaagaatacgccaaggaaagtttattaaaaataaaatacatttattgcctggtgattgggtagaagtagctgttcaagaatatacaagtattatttttggaagacagccgtctctacatagatacaacgtcatcgcttcatctatcagagctaccgaaggagatactatcaaaatatctcccggaattgccaactctcaaaatgctgatttcgacggggatgaggaatggatgatattagaacaaaatcctaaagctgtaattgaacaaagtattcttatgtatccgacgacgttactcaaacacgatattcatggagcccccgtttatggatctattcaagatgaaatcgtagcagcgtattcattgtttaggatacaagatctttgtttagatgaagtattgaacatcttggggaaatatggaagagagttcgatcctaaaggtaaatgtaaattcagcggtaaagatatctatacttacttgataggtgaaaagattaattatccgggtctcttaaaggatggtgaaattattgcaaacgacgtagatagtaattttgttgtggctatgaggcatctgtcattggctggactcttatccgatcataagtcgaacgtggaaggtatcaactttattatcaagtcatcttatgtttttaagagatatctatctatttacggttttggggtgacattcaaagatctgagaccaaattcgacgttcactaataaattggaggccatcaacgtagaaaaaatagaacttatcaaagaagcatacgccaaatatctcaacgatgtaagagacgggaaaatagttccattatctaaagctttagaggcggactatgtggaatccatgttatccaacttgacaaatcttaatatccgagagatagaagaacatatgagacaaacgctgatagatgatccagataataacctcctgaaaatggccaaagcgggttataaagtaaatcccacagaactaatgtatattctaggtacgtatggacaacaaaggattgatggtgaaccagcagagactcgagtattgggtagagttttaccttactatcttccagactctaaggatccagaaggaagaggttacattcttaattctttaacaaaaggattaacgggttctcaatattacttttcgatgctggttgccagatctcaatctactgatatcgtctgtgaaacatcacgtaccggaacactggctagaaaaatcattaaaaagatggaggatatggtggtcgacggatacggacaagtagttataggtaatacgctcatcaagtacgccgccaattataccaaaattctaggctcagtatgtaaacctgtagatcttatctatccagatgagtccatgacttggtatttggaaattagtgctctgtggaataaaataaaacagggattcgtttactctcagaaacagaaacttgcaaagaagacattggcgccgtttaatttcctagtattcgtcaaacccaccactgaggataatgctattaaggttaaggatctgtacgatatgattcataacgtcattgatgatgtgagagagaaatacttctttacggtatctaatatagattttatggagtatatattcttgacgcatcttaatccttctagaattagaattacaaaagaaacggctatcactatctttgaaaagttctatgaaaaactcaattatactctaggtggtggaactcctattggaattatttctgcacaggtattgtctgagaagtttacacaacaagccctgtccagttttcacactactgaaaaaagtggtgccgtcaaacaaaaacttggtttcaacgagtttaataacttgactaatttgagtaagaataagaccgaaattatcactctggtatccgatgatatctctaaacttcaatctgttaagattaatttcgaatttgtatgtttgggagaattaaatccaaacatcactcttcgaaaagaaacagataaatatgtagtagatataatagtcaatagattatacatcaagagagcagaaataaccgaattagtcgtcgaatatatgattgaacgatttatctcctttagcgtcattgtaaaggaatggggtatggagacattcattgaggacgaggataatattagatttactgtctacctaaatttcgttgaaccggaagaattgaatcttagtaagtttatgatggttcttccgggggcagccaacaagggaaagattagtaaattcaagattcctatctctgattatacgggatatgacgacttcaatcaaacaaaaaagctcaataagatgactgtagaactcatgaatctaaaagaattgggttctttcgatttggaaaacgtcaacgtgtatcctggagtatggaatacatacgatatcttcggtatcgaggccgctcgtgaatacttgtgcgaagccatgttaaacacctatggagaagggttcgattatctgtatcagccttgtgatcttctcgctagtttactatgtgctagttacgaaccagaatcagtgaataaattcaagttcggcgcagctagtactcttaagagagctacgttcggagacaataaagcattgttaaacgcggctcttcataaaaagtcagaacctattaacgataatagtagctgccacttttttagcaaggtccctaatataggaactggatattacaaatactttatcgacttgggtcttctcatgagaatggaaaggaaactatctgataagatatcttctcaaaagatcaaggaaatggaagaaacagaagacttttaattcttatcaataacatatttttctatgatctgtcttttaaacgatggattttccacaaatgcgcctctcaagtccctcatagaatgatacacgtataaaaaatatagcataggcaatgactccttatttttagacattagatatgccaaaatcatagccccgcttctatttactcccgcagcacaatgaaccaacacgggctcgtttcgttgatcacatttagataaaaaggcggttacgtcgtcaaaatatttactaatatcggtagttgtatcatctaccaacggtatatgaataatattaatattagagttaggtaatgtatatttatccatcgtcaaatttaaaacatatttgaacttaacttcagatgatggtgcatccatagcatttttataatttcccaaatacacattattggttacccttgtcattatagtgggagatttggctttgtgcatatctccagttgaacgtagtagtaagtatttatacaaacttttcttatccatttataacgtacaaatggataaaactactttatcggtaaacgcgtgtaatttagaatacgttagagaaaaggctatagtaggcgtacaagcagccaaaacatcaacacttatattctttgttattatattggcaattagtgcgctattactctggtttcagacgtctgataatccagtctttaatgaattaacgagatatatgcgaattaaaaatacggttaacgattggaaatcattaacggatagcaaaacaaaattagaaagtgatagaggtagacttctagccgctggtaaggatgatatatttgaattcaaatgtgtggatttcggcgcctattttatagctatgcgattggataagaaaacatatctgccgcaagctattaggcgaggtactggagacgcgtggatggttaaaaaggcggcaaaggtcgatccatctgctcaacaattttgtcagtatttgataaaacacaagtctaataatgttattacttgtggtaatgagatgttaaatgaattaggttatagcggttattttatgtcaccgcattggtgttccgattttagtaatatggaatagtgttagataaatgcggtaacgaatgttcctgtaaggaaccataacagcttagatttaacgttaaagatgagcataaacataataaacaaaattacaatcaaacttataacattaatatcaaacaatccaaaaaatgaaatcagtggagtagtaaacgcgtacataactcctggataacgtttagcagctgccgttcctattctagaccaaaaattcggtttcatgttttcgaaacggtattctgcaacaagtcgaggatcgtgttctacatatttggcggcattatccagtatctgcctattgatcttcatttcgttttcgattctggctatttcaaaataaaatcccgatgatagacctccagactttataatttcatctacgatgttcagcgccgtagtaactctaataatataggctgataagctaacatcataccctcctgtatatgtgaatatggcatgatttttgtccattacaagctcggttttaactttattgcctgtaataatttctctcatctgtaggatatctatttttttgtcatgcattgccttcaagacgggacgaagaaacgtaatatcctcaataacgttatcgttttctacaataactacatattctacctttttattttctaactcggtaaaaaaattagaatcccatagggctaaatgtctagcgatatttcttttcgtttcctctgtacacatagtgttacaaaaccctgaaaagaagtgagtatacttgtcatcatttctaatgtttcctccagtccactgtataaacgcataatccttgtaatgatctggatcatccttgactaccacaacatttcttttttctggcataacttcgttgtcctttacatcatcgaacttctgatcattaatatgctcatgaacattaggaaatgtttctgatggaggtctatcaataactggcacaacaataacaggagttttcaccgccgccatttagttattgaaattaatcatatacaactctttaatacgagttatattttcgtctatccattgtttcacattgacatatttcgacaaaaagatataaaatgcgtattccaatgcttctctgtttaatgaattactaaaatatacaaacacgtcactgtctggcaataaatgatatcttagaatattgtaacaatttattttgtattgcacatgttcgtgatctatgagttcttcttcgaatggcataggatctccgaatctgaaaacgtataaataggagttagaataataatatttgagagtattggtaatatataaactctttagcggtataattagtttttttctctcaatttctatttttagatgtgatggaaaaatgactaattttgtagcattagtatcatgaactctaatcaaaatcttaatatcttcgtcacacgttagctctttgaagtttttaagagatgcatcagttggttctacagatggagtaggtgcaacaattttttgttctacacatgtatgtactggagccattgttttaactataatggtgcttgtatcgaaaaactttaatgcagatagcggaagctcttcgccgcgactttctacgtcgtaattgggttctaacgccgatctctgaatggatactagttttctaagttctaatgtgattctctgaaaatgtaaatccaattcctccggcattatagatgtgtatacatcggtaaataaaactatagtatccaacgatcccttctcgcaaattctagtcttaaccaaaaaatcgtatataaccacggagatggcgtatttaagagtggattcttctaccgttttgttcttggatgtcatataggaaactataaagtccgcactactgttaagaatgattactaacgcaactatatagtttaaattaagcattttggaaacataaaataactctgtagacgatacttgactttcgaataagtttgcagacaaacgaagaaagaacagacctctcttaatttcagaagaaaactttttttcgtattcctgacgtctagagtttatatcaataagaaagttaagaattagtcggttaatgttgtatttcattacccaagtttgagatttcataatattatcaaaagacatgataatattaaagataaagcgctgactatgaacgaaatagctatatggttcgctcaagaatatagtcttgttaaacgtggaaacgataactgtatttttaatcacgtcagcggcatctaaattaaatataggtatatttattccacacactctacaatatgccacaccatcttcataataaataaattcgttagcaaaattattaattttagtgaaatagttagcgtcaactttcatagcttccttcaatctaatttgatgctcacacggtgcgaattccactctaacatcccttttccatgcctcaggttcatcgatctctataatatctagttttttgcgtttcacaaacacaggctcgtctctcgcgatgagatctgtatagtaactatgtaaatgataactagatagaaagatgtagctatatagatgacgatcctttaagagaggtataataactttaccccaatcagatagactgttgttatggtcttcggaaaaagaatttttataaatttttccagtattttccaaatatacgtacttaacatctaaaaaatccttaatgataataggaatggataatccgtctattttataaagaaatacatatcgcacattatacttttttttggaaatgggaataccgatgtgtctacataaatatgcaaagtctaaatattttttagagaatcttagttggtccaaattcttttccaagtacggtaatagatttttcatattgaacggtatcttcttaatctctggttctagttccgcattaaatgatgaaactaagtcactatttttataactaacgattacatcacctctaacatcatcatttaccagaatactgatcttcttttgtcgtaaatacatgtctaatgtgttaaaaaaaagatcatacaagttatacgtcatttcatctgtggtattcttgtcattgaaggataaactcgtactaatctcttctttaacagcctgttcaaatttatatcctatatacgaaaaaatagcaaccagtgtttgatcatccgcgtcaatattctgttctatcgtagtgtataacaatcgtatatcttcttctgtgatagtcgatacgttataaaggttgataacgaaaatatttttatttcgtgaaataaagtcatcgtaggattttggacttatattcgcgtctagtagatatgcttttatttttggaatgatctcaattagaatagtctctttagagtccatttaaagttacaaacaactaggaaattggtttatgatgtataatttttttagtttttatagattctttattctatacttaaaaaatgaaaataaatacaaaggttcttgagggttgtgttaaattgaaagcgagaaataatcataaattatttcattatcgcgatatccgttaagtttgtatcgtaatggcgtggtcaattacgaataaagcggatactagtagcttcacaaagatggctgaaatcagagctcatctaaaaaatagcgctgaaaataaagataaaaacgaggatattttcccggaagatgtaataattccatctactaagcccaaaaccaaacgagccactactcctcgtaaaccagcggctactaaaagatcaaccaaaaaggaggaagtggaagaagaagtagttatagaggaatatcatcaaacaactgaaaaaaattctccatctcctggagtcagcgacattgtagaaagcgtggccgctgtagagctcgatgatagcgacggggatgatgaacctatggtacaagttgaagctggtaaagtaaatcatagtgctagaagcgatctctctgacctaaaggtggctaccgacaatatcgttaaagatcttaagaaaattattactagaatctctgcagtatcgacggttctagaggatgttcaagcagctggtatctctagacaatttacttctatgactaaagctattacaacactatctgatctagtcaccgagggaaaatctaaagttgttcgtaaaaaagttaaaacttgtaagaagtaaatgcgtgcacttttttataaagatggtaaactctttaccgataataattttttaaatcctgtatcagacgataatccagcgtatgaggttttgcaacatgttaaaattcctactcatttaacagatgtagtagtatatgaacaaacgtgggaggaggcgttaactagattaatttttgtgggaagtgattcaaaaggacgtagacaatacttttacggaaaaatgcatgtacagaatcgcaacgctaaaagagatcgtatttttgttagagtatataacgttatgaaacgaattaattgttttataaacaaaaatataaagaaatcgtccacagattccaattatcagttggcggtttttatgttaatggaaactatgttttttattagatttggtaaaatgaaatatcttaaggagaatgaaacagtagggttattaacactaaaaaataaacacatagaaataagtcccgatgaaatagttatcaagtttgtaggaaaggacaaagtttcacatgaatttgttgttcataagtctaatagactatataaaccgctattgaaactgacggatgattctagtcccgaagaatttctgttcaacaaactaagtgaacgaaaggtatacgaatgtatcaaacagtttggtattagaatcaaggatctccgaacgtatggagtcaattatacgtttttatataatttttggacaaatgtaaagtccatatctcctcttccgtcaccaaaaaagttaatagcattaactatcaaacaaactgctgaagtggtaggtcatactccatcaatttcaaaaagagcttatatggcaacgactattttagaaatggtaaaggataaaaattttttagatgtagtatctaaaactacgttcgatgaattcctatctatagtcgtagatcacgttaaatcatctacggatggatgatatagatctttacacaaataattacaagaccgataaatggaaatggataagcgtatgaaatctctcgcaatgacagctttcttcggagagctaagcacattagatattatggcattgataatgtctatatttaaacgccatccaaacaataccattttttcagtggataaggatggtcagtttatgattgatttcgaatacgataattataaggcttctcaatatttggatctgaccctcactccgatatctggagatgaatgcaagactcacgcatcgagtatagccgaacaattggcgtgtgcggatattattaaagaggatattagcgaatatatcaaaactactccccgtcttaaacgatttataaaaaaataccgcaatagatcagatactcgtatcagtcgagatacagaaaagcttaaaatagctctagctaaaggcatagattacgaatatataaaagacgcttgttaataagtaaatgaaaaaaaactagtcgtttataataaaacacgatatggatgccaacgtagtatcattttctactattgcgacgtatatagacgctttagcgaagaatgcttcggaattagaacagaggtctaccgcatacgaaataaataatgaattggaactagtatttattaagccgccattgattactttgacaaatgtagtgaatatctctacgattcaggaatcgtttattcgatttaccgttactaataaggaaggtgttaaaattagaactaagattccattatctaaggtacatggtctagatgtaaaaaatgtacagttagtagatgctatagataacatagtttgggaaaagaaatcattagtgacggaaaatcgtcttcacaaagaatgcttgttgagactatcgacagaggaacgtcatatatttttggattacaagaaatatggatcctctatccgactagaattagtcaatcttattcaagcaaaaacaaaaaactttacgatagactttaagctaaaatattttctaggatccggtgcccagtctaaaagttctttgttgcacgctattaatcatccaaagtcaaggcctaatacatctctggaaatagaattcacacctagagacaatgaaacagttccatatgatgaactaataaaggaattgacgactctctcgcgtcatatatttatggcttctccagagaatgtaattctttctccgcctattaacgcgcctataaaaacctttatgttgcctaaacaagatatagtaggtttggatctggaaaatctatatgccgtaactaagactgacggcattcctataactatcagagttacatcaaacgggttgtattgttattttacacatcttggttatattattagatatcctgttaagagaataatagattccgaagtagtagtctttggtgaggcagttaaggataagaactggaccgtatatctcattaagctaatagagcctgtgaatgcaatcaatgatagactagaagaaagtaagtatgttgaatctaaactagtggatatttgtgatcggatagtattcaagtcaaagaaatacgaaggtccgtttactacaactagtgaagtcgtcgatatgttatctacatatttaccaaagcaaccagaaggtgttattctgttctattcaaagggacctaaatctaacattgattttaaaattaaaaaggaaaatactatagaccaaactgcaaatgtagtatttaggtacatgtccagtgaaccaattatctttggagaatcgtctatctttgtagagtataagaaatttagcaacgataaaggctttcctaaagaatatggttctggtaagattgtgttatataacggcgttaattatctaaataatatctattgtttggaatatattaatacacataatgaagtgggtattaagtccgtggttgtacctattaagtttatagcagaattcttagttaatggagaaatacttaaacctagaattgataaaaccatgaaatatattaactcagaagattattatggaaatcaacataatatcatagtcgaacatttaagagatcaaagcatcaaaataggagatatctttaacgaggataaactatcggatgtgggacatcaatacgccaataatgataaatttagattaaatccagaagttagttattttacgaataaacgaactagaggaccgttgggaattttatcaaactacgtcaagactcttcttatttctatgtattgttccaaaacatttttagacgattccaacaaacgaaaggtattggcgattgattttggaaacggtgctgacctggaaaaatacttttatggagagattgcgttattggtagcgacggatccggatgctgatgctatagctagaggaaatgaaagatacaacaaattaaactctggaattaaaaccaagtactacaaatttgactacattcaggaaactattcgatccgatacatttgtctctagtgtcagagaagtattctattttggaaagtttaatatcatcgactggcagtttgctatccattattcttttcatccgagacattatgctaccgtcatgaataacttatccgaactaactgcttctggaggcaaggtattaatcactaccatggacggagacaaattatcaaaattaacagataaaaagacttttataattcataagaatttacctagtagcgaaaactatatgtctgtagaaaaaatagctgatgatagaatagtggtatataatccatcaacaatgtctactccaatgactgaatacattatcaaaaagaacgatatagtcagagtgtttaacgaatacggatttgttcttgtagataacgttgatttcgctacaattatagaacgaagtaaaaagtttattaatggcgcatctacaatggaagatagaccgtctacaaaaaactttttcgaactaaatagaggagccattaaatgtgaaggtttagatgtcgaagacttacttagttactatgttgtttatgtcttttctaagcggtaaataataatatggtatgggttctgatctcccagttctaaatgcattaaataattccaatagagcgatttttgttcctataggaccttccaactgtggatactctgtattgttaatagatatattaatacttttgtcgggtaacagaggttctacgtcttctaaaaataaaagttttataacatctggcctgttcataaataaaaacttggcgattctatatatactcttattatcaaatctagccattgtcttatagatgtgagctactgtaggtgtaccatttgattttctttctaatactatatatttctctcgaagaagttcttgcacatcatctgggaataaaatactactgttgagtaaatcagttattttttttatatcgatattgatggacatttttatagttaaggataataagtatcccaaagtcgataacgacgataacgaagtatttatacttttaggaaatcacaatgactttatcagattaaaattaacaaaattaaaggagcatgtatttttttctgaatatattgtgactccagatacatatggatctttatgcgtcgaattaaatgggtctagttttcagcacggcggtagatatatagaggtggaggaatttatagatgctggaagacaagttagatggtgttctacatccaatcatatatctaaagatatacccgaagatatgcacactgataaatttgtcatttatgatatttatacgtttgattcgttcaagaataaacgattggtattcgtacaggtacctccgtcgttaggagatgatagtcatttgactaatccgttattgtcaccgtattatcgtaattcagtagccagacaaatggtcaatgatatgatttttaatcaagattcatttttaaaatatttattagaacatctgattagaagccactatagagtttctaaacatataacaatagttagatacaaggataccgaagaattaaatctaacgagaatatgttataatagagataagtttaaggcgtttgtattcgcttggtttaacggcgtttcggaaaatgaaaaggtactagatacgtataaaaaggtatctaatttgatataatgaattcagtgactgtatcacacgcgccatatactattacttatcacgatgattgggaaccagtaatgagtcaattggtagagttttataacgaagtagccagttggctgctacgagacgagacgtcgcctattcctgataagttctttatacagttgaaacaaccgcttagaaataaacgagtatgtgtgtgtggtatagatccgtatccgaaagatggaactggtgtaccgttcgaatcaccaaattttacaaaaaaatcaattaaggagatagcttcatctatatctagattaaccggagtaattgattataaaggttataaccttaatataatagacggggttataccctggaattattacttaagttgtaaattaggagaaacaaaaagtcacgcgatttactgggataagatttccaagttactgctgcagcatataactaaacacgttagtgttctttattgtttgggtaaaacagatttctcgaatatacgggccaagttagaatccccggtaactaccatagtcggatatcatccagcggctagagaccgccaattcgagaaagatagatcatttgaaattatcaacgttttactggaattagacaacaaggcacctataaattgggctcaagggtttatttattaatgctttagtgaaattttaacttgtgttctaaatggatgcggctattagaggtaatgatgttatctttgttcttaagactataggtgtcccgtcagcgtgcagacaaaatgaagatccaagatttgtagaagcatttaaatgcgacgagttagaaagatatattgagaataatccagaatgtacactattcgaaagtcttagggatgaggaagcatactctatagtcagaattttcatggatgtagatttagacgcgtgtctagacgaaatagattatttaacggccattcaagattttattatcgaggtgtcaaactgtgtagctagattcgcgtttacagaatgcggcgccattcatgaaaatgtaataaaatccatgagatctaatttttcattgactaagtctacaaatagagataaaacaagttttcatattatctttttagatacgtataccactatggatacattgatagctatgaaacgaacactattagaattaagtagatcatctgaaaatccactaaccagatcgatagacactgccgtatataggagaaaaacaactcttcgggttgtaggtactaggaaaaatccaaattgcgacactattcatgtaatgcaaccaccgcatgataatatagaagattacctattcacttacgtggatatgaacaacaatagttattacttttctctacaacaacgattggaggatttagttcctgataagttatgggaaccagggtttatttcattcgaagacgctataaaaagagtttcaaaaatattcattaattctataataaactttaatgatctcgatgaaaataattttacaacggtaccactggtcatagattacgtaacaccttgtgcattatgtaaaaaacgatcgcataaacatccgcatcaactatcgttggaaaatggtgctattagaatttacaaaactggtaatccacatagttgtaaagttaaaattgttccgttggatggtaataaactgtttaatattgcacaaagaattttagacactaactctgttttattaaccgaacgaggagaccatatagtttggattaataattcatggaaatttaacagcgaagaacccttgataacaaaactaattttgtcaataagacatcaactacctaaggaatattcaagcgaattactctgtccaagaaaacgaaagactgtagaagctaacatacgagacatgttagtagattcagtggagaccgatacctatccggataaacttccgtttaaaaatggtgtattggacctggtagacggaatgttttactctggagatgatgctaaaaaatatacgtgtactgtatcaaccggatttaaatttgacgatacaaagttcgtcgaagacagtccagaaatggaagagttaatgaatatcattaacgatatccaaccattaacggatgaaaataagaaaaatagagagctatatgaaaaaacattatctagttgtttatgcggtgctaccaaaggatgtttaacattcttttttggagaaactgcaactggaaagtcgacaaccaaacgtttgttaaagtctgctatcggtgacctgtttgttgagacgggtcaaacaattttaacagatgtattggataaaggacctaatccatttatcgctaacatgcatttgaaaagatctgtattctgtagcgaactacctgattttgcctgtagtggatcaaagaaaattagatctgacaatattaaaaagttgacagaaccttgtgtcattggaagaccgtgtttctccaataaaattaataatagaaaccatgcgacaatcattatcgatactaattacaaacctgtttttgataggatagataacgcattaatgagaagaattgccgtcgtgcgattcagaacacacttttctcaaccttctggtagagaggctgctgaaaataatgacgcgtacgataaagtcaaactattagacgaggggttagatggtaaaatacaaaataatatatatagatttgcatttctatacttgttggtgaaatggtacaaaaaatatcatgttcctattatgaaactatatcctacacccgaagagattcctgactttgcattctatctcaaaataggtactctgttggtatctagctctgtaaagcatattccattaatgacggacctctccaaaaagggatatatattgtacgataatgtggtcactcttccgttgactactttccaacagaaaatatccaagtattttaattctagactatttggacacgatatagagagcttcatcaatagacataagaaatttgccaatgttagtgatgaatatctgcaatatatattcatagaggatatttcatctccgtaaatatatgctcatatatttatagaagatatcacatatctaaatgaataccggaatcatagatttatttgataatcatgttgatagtataccaactatattacctcatcagttagctactctagattatctagttagaactatcatagatgagaacagaagcgtgttattgttccatattatgggatcaggtaaaacaataatcgctttgttgttcgccttggtagcttccagatttaaaaaggtttacattctagtgccgaacatcaacatcttaaaaattttcaattataatatgggtgtagctatgaacttgtttaatgacgaattcatagctgagaatatctttattcattccacaacaagtttttattctcttaattataacgataacgtcattaattataacggattatctcgctacaataactctatttttatcgttgatgaggcacataatatctttgggaataatactggagaacttatgaccgtgataaaaaataaaaacaagattccttttttactattgtctggatctcccattactaacacacctaatactctgggtcatattatagatttaatgtccgaagagacgatagattttggtgaaattattagtcgtggtaagaaagtaattcagacacttcttaacgaacgcggtgtgaatgtacttaaggatttgcttaaaggaagaatatcatattacgaaatgcctgataaagatctaccaacgataagatatcacggacgtaagtttctagatactagagtagtatattgtcacatgtctaaacttcaagagagagattatatgattactagacgacagctatgttatcatgaaatgtttgataaaaatatgtataacgtgtcaatggcagtattgggacaacttaatctgatgaataatttagatactttatttcaggaacaggataaggaattgtacccaaatctgaaaataaataatggcgtgttatacggagaagaattggtaacgttaaacattagttccaaatttaaatactttattaatcggatacagacactcaacggaaaacattttatatacttttctaattctacatatggcggattggtaattaaatatatcatgctcagtaatggatattctgaatataatggttctcagggaactaatccacatatgataaacggcaaaccaaaaacatttgctatcgttactagtaaaatgaaatcgtctttagaggatctattagatgtgtataattctcctgaaaacgatgatggtagtcaattgatgtttttgttttcatcaaacattatgtccgaatcctatactctaaaagaggtaaggcatatttggtttatgactatcccagatactttttctcaatacaaccaaattcttggacgatctattagaaaattctcttacgccgatatttctgaaccagttaatgtatatcttttagccgccgtatattccgatttcaatgacgaagtgacgtcattaaacgattacacacaggatgaattaattaatgttttaccatttgacatcaaaaagctgttgtatctaaaatttaagacgaaagaaacgaatagaatatactctattcttcaagagatgtctgaaacgtattctcttccaccacatccatcaattgtaaaagttttattgggagaattggtcagacaatttttttataataattctcgtattaagtataacgataccaagttacttaaaatggttacatcagttataaaaaataaagaagacgctaggaattacatagatgatattgtaaacggtcacttctttgtatcgaataaagtatttgataaatctcttttatacaaatacgaaaacgatattattacagtaccgtttagactttcctacgaaccatttgtttggggagttaactttcgtaaagaatataacgtggtatcttctccataaaactgatgagatatataaagaaataaatgtcgagctttgttaccaatggatacctttccgttacattggaaccacacgagctgacgttagacataaaaactaatattaggaatgccgtatataagacgtatctccatagagaaattagtggtaaaatggccaagaaaatagaaattcgtgaagacgtggaattacctctcggcgaaatagttaataattctgtagttataaacgttccgtgtgtaataacctacgcgtattatcacgttggggatatagtcagaggaacattaaacatcgaagatgaatcaaatgtaactattcaatgtggagatttaatctgtaaactaagtagagattcgggtactgtatcatttagcgattcaaagtactgcttttttcgaaatggtaatgcgtatgacaatggcagcgaagtcactgccgttctaatggaggctcaacaaggtatcgaatctagttttgtttttctcgcgaatatcgtcgactcataaaaaagagaatagcggtaagtataaacacgaatactatggcaataattgcgaatgttttattctcttcgatatatttttgataatatgaaaaacatgtctctctcaaatcggacaaccatctcataaaatagttctcgcgcgctggagaggtagttgccgctcgtataatctctccagaataatatacttgcgtgtcgtcgttcaatttatacggatttctatagttctctgttatataatgcggtttgccctcatgattagacgacgacaatagtgttctaaatttagatagttgatcagaatgaatgtttattggcgttggaaaaattatccatacagcgtctgcagagtggttgatagttgttcctagatatgtaaaataatccaacttactaggcagcaaattgtctagataaaatactgaatcaaacggtgcagacgtattggcggatctaatggaatccaattgattaactatcttttgaaaatatacatttttatgatccaatacttgtaagaatatagaaataatgataagtccatcatcgtgtttttttgcctcttcataagaactatattttttcttattccaatgaacaagattaatctctccagagtatttgtacacatctatcaagtgattggatccataatcgtcttcctttccccaatatatatgtagtgatgataacacatattcattggggagaaaccctccacttatatatcctcctttaaaattaatccttactagttttccagtgttctggatagtggttggtttcgactcattataatgtatgtctaacggcttcaatcgcgcgttagaaattgcttttttagtttctatattaataggagatagttgttgcggcatagtaaaaatgaaatgataactgtttaaaaatagctcttagtatgggaattacaatggatgaggaagtgatatttgaaactcctagagaattaatatctattaaacgaataaaagatattccaagatcaaaagacacgcatgtgtttgctgcgtgtataacaagtgacggatatccgttaataggagctagaagaacttcattcgcgttccaggcgatattatctcaacaaaattcagattctatctttagagtatccactaaactattacggtttatgtactacaatgaactaagagaaatctttagacggttgagaaaaggttctatcaacaatatcgatcctcactttgaagagttaatattattgggtggtaaactagataaaaaggaatctattaaagattgtttaagaagagaattaaaagaggaaagtgatgaacgtataacagtaaaagaatttggaaatgtaattctaaaacttacaacacgggataaattatttaataaagtatatataagttattgcatggcgtgttttattaatcaatcgttggaggatttatcgcatactagtatttacaatgtagaaattagaaagattaaatcattaaatgattgtattaacgacgataaatacgaatatctgtcttatatttataatatgctagttaatagtaaatgaacttttacagatctagtataattagtcagattattaagtataatagacgactagctaagtctattatttgcgaggatgactctcaaattattacactcacggcattcgttaaccaatgcctatggtgtcataaacgagtatccgtgtccgctattttattaactactgataacaaaatattagtatgtaacagacgagatagttttctctattctgaaataattagaactagaaacatgtttagaaagaaacgattatttctgaattattccaattatttgaacaaacaggaaagaagtatactatcgtcatttttttctctagatccagctactactgataatgatagaatagacgctatttatccgggtggcatacccaaaaggggtgagaatgttccagagtgtttatccagggaaattaaagaagaagttaatatagacaattcttttgtattcatagacactcggttttttattcatggcatcatagaagataccattattaataaattttttgaggtaatcttctttgtcggaagaatatctctaacgagtgatcaaatcattgatacatttaaaagtaatcatgaaatcaaggatctaatatttttagatccgaattcaggtaatggactccaatacgaaattgcaaaatatgctctagatactgcaaaacttaaatgttacggccatagaggatgttattatgaatcattaaaaaaattaactgaggatgattgattaaaaaatataaattaatttaccatcgtgtatttttataacgggattgtccggcatatcatgtagatagttaccgtctacatcgtatactcgaccatctacgcctttaaatcctctatttattgacattaatctattagaattggaataccaaatattagtaccctcaattagtttattggtaatattttttttagacgatagatcgatggctcttgaaaccaaggttttccaaccggactcattgtcgatcggtgagaagtctttttcattagcatgaatccattctaatgatgtatgtttaaacactctaaacaattggacaaattcttttgatttgctttgaatgatttcaaataggtcttcgtctacagtaggcataccattagataatctagccattataaagtgcacgtttacatatctacgttctggaggagtaagaacgtgactattgagacgaatggctcttcctactatctgacgaagagacgcctcgttccatgtcatatctaaaatgaagatatcattaattgagaaaaaactaataccctcgcctccactagaagagaatacgcatgttttaatgcattctccgttagtgtttgattcttggttaaactcagccaccgccttgattctagtatcttttgttctagatgagaactctatattagagataccaaagactttgaaatatagtaataagatttctattcctgactgattaacaaatggttcaaagactagacatttaccatgggatgctaatattcccaaacatacatctataaatttgacgcttttctcttttaattcagtaaatagagagatatcagccgcactagcatcccctttcaatagttctccctttttaaaggtatctaatgcggatttagaaaactctctatctcttaatgaatttttaaaatcattatatagtgttgctatctcttgcgcgtattcgcccggatcacgattttgtctttcaggaaagctatcgaacgtaaacgtagtagccatacgtctcagaattctaaatgatgatatacctgtttttatttcagcgagtttagccttttgataaatttcttcttgctttttcgacatattaacgtatcgcattaatactgttttcttagcgaatgatgcagacccttctacgtcatcaaaaatagaaaactcgttattaactatatacgaacatagtcctcctagtttggagactaattctttttcatcgactagacgtttattctcaaatagcgattggtgttgtaaggatcctggtcgtagtaagttaaccaacatggtgaattcttgcacactattgacgataggtgtagccgataaacaaatcatcttatggttttttaacgcaatggtcttagataaaaaattatatactgaacgagtaggacggatcttaccatcttctttgattaatgatttagaaatgaagttatgacattcatcaataatgacgcatattctactcttggaattaatagttttgatattagtaaaaaatttatttctaaaattttgatcatcgtaattaataaaaatacaatccttcgttatctctggagcgtatctgagtatagtgttcatccaaggatcttctatcaaagcctttttcaccaataagataatagcccaattcgtataaatatccttaagatgtttgagaatatatacagtagtcattgttttaccgacacccgtttcatggaacaataaaagagaatgcatactgtctaatcctaagaaaactcttgctacaaaatgttgataatccttgaggcgtactacgtccgaccccatcatttcaacgggcatattagtagttctgcgtaaggcataatcgatataggccgcgtgtgatttactcatttatgagtgataagtaataactatgttttaaaaatcacagcagtagtttaactagtcttctctgatgtttgttttcgatactttttgaatcagaagtcatactagaataaagcaacgagtgaacgtaatagagagcttcgtatactctattcgaaaactctaagaacttattaatgaattccgtatccactggattgtttaaaatactaaattgaacactgttcacatccttccaagaagaagacttagtgacggacttaacatgagacataaataaatccaaattttttttacaaacatcactagccaccataatggcgctatctttcaaccagctatcgcttacgcattttagcagtctaacatttttaaagagactacaatatattctcatagtatcgattacacctctaccgaataaagttggaagtttaataatacaatatttttcgtttacaaaatcaaataatggtcgaaacacgtcgaaggttaacatcttataatcgctaatgtatagattgttttcagtgagatgattattagatttaatagcatctcgttcacgtttgaacagtttattgcgtgcgctgaggtcggcaactacggcgtccgctttagtactcctcccataatactttacgctattaatctttaaaatttcatagactttatctagatcgctttctggtaacatgatatcatgtgtaaaaagttttaacatgtcggtcggcattctatttagatcattaactctagaaatctgaagaaagtaattagctccgtattccagactaggtaatgggcttttacctagagacagattaagttctggcaatgtttcataaaatggaagaaggacatgcgttccctcccggatattttttacaatttcatccatttacaactctatagtttgttttcattattattagttattatctcccataatcttggtaatacttaccccttgatcgtaagataccttatacaggtcattacatacaactaccaattgtttttgtacataatagattggatggttgacatccatggtggaataaactactcgaacagatagtttatctttccccctagatacattagccgtaatagttgtcggcctaaagaatatctttggtgtaaagttaaaagttagggttcttgttccattattgctttttgtcagtagttcattataaattctcgagatgggtccgttctctgaatatagaacatcatttccaaatctaacttctagtctagaaataatatcggtcttattcttaaaatctattcccttgatgaagggatcgttaatgaacaaatccttggcctttgattcggctgatctattatctccgttatagacgttacgttgactagtccaaagacttacaggaatagatgtatcgatgatgttgatactatgtgatatgtgagcaaagattgttctcttagtggcatcactatatgttccagtaatggcggaaaactttttagaaatgttatatataaaagaattttttcgtgttccaaacattagcagattagtatgaagataaacactcatattatcaggaacattatcaatttttacatacacatcagcatcttgaatagaaacgataccatcttctggaacctctacgatctcggcagactccggataaccagtcggtgggccatcgctaacaataactagatcatccaacaatctactcacatatgcatctatataatctttttcatcttgtgagtaccctggatacgaaataaatttattatccgtatttccataataaggtttagtataaacagagagagatgttgccgcatgaacttcagttacagtcgccgttggttggtttatttgacctattactctcctaggtttctctataaacgatggtttaatttgtacattcttaaccatatatccaataaagctcaattcaggaacataaacaaattctttgttgaacgtttcaaagtcgaacgaagagtcacgaataacgatatcggatactggattgaaggttaccgttacggtaatttttgaatcggatagtttaagactgctgaatgtatcttccacatcaaacggagttttaatataaacgtatactgtagatggttctttaatagtgtcattaggagttaggccaatagaaatatcattaagttcactagaatatccagagtgtttcaaagcaattgtattattgatacaattattatataattcttcgccctcaatttcccaaataacaccgttacacgaagagatagatacgtgattaatacatttatatccaacatatggtacgtaactgaatcttcccatacctttaacttctggaagttccaaactcagaaccaaatgattaagcgcagtaatatactgatccctaatttcgaagctagcgatagcctgattgtctggaccatcgtttgtcataactccggatagagaaatatattgcggcatatacaaagttggaatttgactatcgactgcgaagacattagaccgtttaatagagtcatccccaccgatcaaagaattaatgatagtattattcattttctatttaaaatggaaaaagcttacaataaactccgtagagaaatatctataatttgtgagttttccttaaagtaacagcttccgtaaacgccgtctttatctcttagtaggtttattgtatttatgaccttttccttatcttcatagaatactaaaggcaacaaagaaatttttggttcttctctaagagctacgtgagacttaaccatagaagccaacgaatccctacatattttagaacagaaataccctacttcaccacccttgtatgtctcaatactaataggtctaaaaaccaaatcttgattacaaaaccaacacttatcaattacactatttgtcttaatagacacatctgccatagatttataatactttggtagtatacaagcgagtgcttcttctttagcgggcttaaagactgctttaggtgctgaaataaccacatctggaaggcttactcgcttagccatttaattacggaactatttttttatacttctaatgagcaagtagaaaacctctcatctacaaaaacgtactcgtgtccataatcctctaccatagttacacgttttttagatctcatatgtgctaaaaagttttcccatactaattggttactattatttttcgtataatttttaacagtttgaggttttagatttttagttacagaagtgatatcgaatattttatccaaaaagaatgaataattaattgtcttagaaggagtgttttcttggcaaaagaataccaagtgcttaaatatttctactacttcattaatcttttctgtactcagattcagtttctcatcttttacttgattgattatttcaaagactaacttataatcctttttatttattctctcgttagccttaagaaaactagatacaaaatttgcatctacatcatccgtggatatttgatttttttccatgatatccaagagttccgagataatttctccagaacattgatgagacaataatctccgcaatacatttctcaaatgaataagtttattagacacgtggaagtttgactttttttgtacctttgtacatttttgaaataccgactcgcaaaaaatacaatattcatatccttgttcagatactataccgttatgtctacaaccgctacataatcgtagattcatgttaacactctacgtatctcgtcgtccaatattttatataaaaacattttatttctagacgttgccagaaaatcctgtaatatttttagttttttgggctgtgaataaagtatcgccctaatattgttaccgtcttccgccaatatagtagttaaattatccgcacatgcagaagaacaccgcttaggcggattcagtacaatgttatatttttcgtaccaactcatttaaatatcataatctaaaatagttctgtaatatgtctagcgctaatatattgatcataatcctgtgcataaattaagatacaacaatgtctcgaaatcatcgacatggcttcttccatagttagaagatcgtcgtcaaagttagcaacgtgattcatcaacatttgctgttttgaggcagcaaatactgaaccgtcgccattcaaccattcataaaaaccatcgtctgaatccattgataatttcttgtactggtttttgagagctcgcatcaatctagcatttctagctcccggattgaaaacagaaagaggatcgtacatccagggtccattttctgtaaatagaatcgtataatgtcccttcaagaagatatcagacgatccacaatcaaagaattggtctccgagtttgtaacaaactgcggactttaacctatacatgataccgtttagcataatttctggtgatacgtcaatcggagtatcatctattagagatctaaagccggtgtaacattctccaccaaacatattcttattctgacgtcgttctacataaaacatcattgctccattaacgataacaggggaatgaacagcactacccatcacattagttcccaatggatcaatgtgtgtaactccagaacatcttccatagcctatgttaggaggagcgaacaccactcttccactattgccatcgaatgccatagaataaatatccttggaattgatagaaatcggactgtcggatgttgtgatcatcttcataggattaacaactatgtatggtgccgcctgaagtttcatatcgtaactgatgccgtttataggtctagccacagaaaccaacgtaggtctaaatccaactatagacaaaatagaagccaatatctgttcctcatctgtcataacttgagagcatccagtatgaataatcttcattagatggggatctaccgcatcatcatcgttacaataaaaaattcccattctaatgttcataattgcttttctaatcatggtatgcatgtttgctctctgaatctctgtggaaattagatctgatacacctgtaatcactatcggattatcctccgtaagacgattaaccaacaacatataattataagactttacttttctaaattcataaagttgctggattaggctataggtgtctccatgtacatacgcgttctcgagcgcaggaagtttaataccgaatagtgccatcagaataggatgaatatagtaattagtttctggttttctataaataaaagacaaatcttgtgaactagacatatcggtaaaatgcatggattggaatcgtgtagtcgacagaagaatatgatgattagatggagagtatattttatctaactctttgagttggtcaccgattctaggactagctcgagaatgaataagtactaaaggatgagtacatttcacagaaacactagcattgttcaatgtgctctttacatgggtaaggagttgaaatagctcgtttctatttgttctgacaatatttagtttattcataatgttaagcatatcctgaatagtaaagttagatgtgtcatacttgttagtagttagatatttagcaattgcattcccatcatttctcaatctcgtactccaatcatgcgtggatgctacttcgtcgatggaaaccatacaatcctttttgataggctgttgagattgatcatttcctgcacgtttaggtttggtacgttgatttctagcccctgcggatataaagtcatcgtctacaatttgggacaatgaattgcatacactacaagacaaagatttatcagaagtgtgaatatgatcttcatctaccaaagaaagagtttgattagtataactagattttagtcctgcgttagatgttaaaaaaacatcgctattgaccacggcttccattatttatattcgtagtttttactcgaaagcgtgattttaatatccaatcttattacttttggaatcgttcaaaacctttgactagttgtagaatttgatctattgccctacgcgtatactcccttgcatcatatacgttcgtcaccagatcgtttgtttcggcctgaagttggtgcatatctctttcaacattcgacatgagatccttaagggccatatcgtctagattttgttgagatgctgctcctggatttggattttgttgtgctgttgtacatactgtaccaccagtaggtgtaggagtacatacagtggccacaataggaggttgagaaagtgtaaccgttggagtagtacaagaaatacttccatccgattgttgtgtacatgtagttgttggtaacgtctgagaaggttgggtagatggcggcgtcgtcgttttttgatctttattaaatttagagataatatcctgaacagcattgctcggcgtcaacgctggaaggagtgaactcgccggcgcatcagtatcttcagacagccaatcaaaaagattagacatatcagatgatgtattagtttgttgtcgtggttttggtgtaggagcagtactactaggtagaagaataggagccgatgtagctgttggaaccggctgtggagttatatgaatagttggttgtagcggttggataggctgtctgctggcggccatcatattatctctagctagttgttctcgcaactgtctttgataatacgactcttgagactttagtcctatttcaatcgcttcatcctttttcgtatccggatccttttcttcagaataatagattgacgactttggtgtagaggattctgccagcctctgtgagaacttgttaaagaagtccatttaaggctttaaaattgaattgcgattataagattaaatggcagacacagacgatattatcgactatgaatccgatgatctcaccgaatacgaggatgatgaagaagaggaagaagatggagagtcactagaaactagtgatatagatcccaaatcttcttataagattgtagaatcagcatccactcatatagaagatgcgcattccaatcttaaacatatagggaatcatatatctgctcttaaacgacgctatactagacgtataagtctatttgaaatagcgggtataatagcagaaagctataacttgcttcaacgaggaagattacctctagtttcagaattttctgacgaaacgatgaagcaaaatatgctacatgtaattatacaagagatagaggagggttcttgtcctatagtcatcgaaaagaacggagaattgttgtcggtaaacgattttgacaaagatggtctaaaattccatctagactatattatcaaaatttggaaacttcaaaaacgatattagaatttatacgaatatcgttctctaaatgtcacaatcaagtctcgcatgttcagcaatttattgtcgtactttatatcgtgttcattaacgatatcttgcaaaatagtaatgattctatcttccttcgatagatattcttcagagattattgtcttatattctttcttgttatcagatatgaatttgataagactttgaacattattgatacccgtctgtttaattttttctacagatattttagttttggcagattctatcgtatctgtcaatagacatccaacatcgacattcgacgtcaattgtctataaatcaacgtataaattttagaaataacattagcgaattgttgtgcgttgatgtcgttattctgaaacagtatgattttaggtagcattttcttaacaaagagaacgtatttattgttactcagttgaacagatgatatatccagattactaacgcatctgattccgtataccaaactttcagaagaaatggtatacaattgtttgtattcattcaatgtctctttttcagaaattagtttagagtcgaatactgcaataattttcaagagatagttttcatcagataagattttatttagtgtagatatgataaaactattgttttgttggagaacttgatacgccgcgttctctgtagtcgacgctctcaaatgggaaacaatctccattatttttttggaatcggatactatatcttcggtatcttgacgcagtctagtatacatagagttaagagagattagagtttgtacattaagcaacatgtctctaaatgtggctacaaacttttcctttttcacatcatctagtttattatataccgatttcacaacggcaccagatttaaggaaccagaatgaaaaactctgataactacaatatttcatcatagttacgattttatcatcttctatagttggtgtaatagcgcatacctttttctccaagactggaaccaacgtcataaaaatgtttaaatcaaaatccatatcaacatctgatgcgctaagaccagtctcgcgttcaagattatctttactaatggtgacgaactcatcgtataaaactctaagtttgtccattatttatttacagatttagttgtttaatttatttgtgctcttccagagttgggatagtatttttctaacgtcggtattatattattaggatctacgttcatatgtatcataatattaatcatccacgttttgataaatctatctttagcttctgaaataacgtatttaaacaaaggagaaaaatatttagctacggcatcagacgcaataacattttttgtaaatgtaacgtatttagacgacagatcttcgttaaaaagttttccatctatgtagaatccatcggttgttaacaccattcccgcgtcagattgaataggagtttgaatagtttgttttggaaatagatccttcaataacttatagttgggtgggaaaaaatcgattttatcactagactctttcttttttactatcattacctcatgaactatttcttgaatgagtatatgtattttctttcctatatcggacgcgttcattggaaaatataccatgtcgttaactataagaatatttttatcctcgtttacaaactgaataatatcagatgtagttcgtaaacgaactatatcatcaccagcacaacatctaactatatgatatccactagtttcctttagccgtttattatcttgttccatattagcagtcattccatcatttaagaaggcgtcaaaaataatagggagaaatgacattttggattctgttacaactttaccaaaattaaggatatacggacttactatctttttctcaacgtcaatttgatgaacacacgatgaaaatgtgcttctatgagattgatcatgtagaaaacaacaagggatacaatatttccgcatatcatgaaatatattaagaaatcccaccttattatatttccccaaaggatccatgcacgtaaacattatgccgttatcattaataaagacttctttctcatcggatctgtaaaagttgttactgatttttttcattccaggatctagataattaataatgatgggttttctattcttattctttgtattttggcatatcctagaccagtaaacagtttccactttggtaaaatcagcagacttttgaacgctattaaacatggcattaatggcaataactaaaaatgtaaaatatttttctatgttaggaatatggtttttcactttaatagatatatggtttttggccaaaatgatagatatttttttatccgaggatagtaaaatattattagtcgccgtctctataaaaatgaagctagtctcgatatccaattttattctagaattgataggagtcgccaaatgtaccttatacgttatatctcccttgatgcgttccatttgtgtatctatatcggacacaagatctgtaaatagttttacgttattaatcatcacggtatcgccgtcgctagataacgctaatgtaccatccaagtcccaaatggagagatttaactgttcatcgtttagaataaaatgattaccggtcatattaataaagtgttcatcgtatctagataacaacgacttataattaatgtccaagtcttgaactcgctgaatgatcttttttaacccagttagttttagattggtacgaaatatattgttaaactttgattctacagtaatgtccaaatctagttgtggaaatacttccatcaacattgtttcaaacttgataatattattatctacatcttcgtacgatccaaattccggaatagatgtatcgcacgctctggccacccagataaccaaaaagtcacacgctccaggatatacattgtataaaaagctatcgttttttagtagggtttttttctgcgtgtatacgaagggattaaaaatagtattatcaacgtaactatattccaaattattcttatgagaatagataataatatcgtccttaatatctaacaaatttcctaaatatccctttaattgagtcattcgaagcgtcaatagaatatgtctcttaactatttccggctgttgtatatttaaatgacttcgtaaaaaataatatatgggcgacttctcatctatgtaatcatatggagtgagatatagggctcgttctacctcctgccccttacccacctgtaataccaattgcggacttactatatatcgcatatttatatcgtggggtaaagtgaaaatctactaccgatgatgtaagtcttacaatgttcgaaccagtaccagatcttaatttggaggcctccgtagaactaggggaggtaaatatagatcaaacaacacctatgataaaggagaatagcggttttatatcccgcagtagacgtctattcgcccatagatctaaggatgatgagagaaaactagcactacgattctttttacaaagactttattttttagatcatagagagattcattatttgttcagatgcgttgacgctgtaaaagacgtcactattaccaaaaaaaataacattatcgtggcgccttatatagcacttttaactatcgcatcaaaaggatgcaaacttacagaaacaatgattgaagcattctttccagaactatataatgaacatagtaagaaatttaaattcaactctcaagtatccatcatccaagaaaaactcggataccagtttggaaactatcacgtttatgattttgaaccgtattactctacagtagctctggctattcgagatgaacattcatctggcatttttaatatccgtcaagagagttatctggtaagttcattatctgaaataacatatagattttatctaattaatctaaaatctgatcttgttcaatggagtgctagtacgggcgctgtaattaatcaaatggtaaatactgtattgattacagtgtatgaaaagttacaactggtcatagaaaatgattcacaatttacatgttcattggctgtggaatcaaaacttccaataaaattacttaaagatagaaatgaattatttacaaaattcattaacgagttaaaaaagaccagttcattcaagataagcaaacgcgataaggatacgctactaaaatattttacttaggactggagttagaatttatagacgactcatttcgtttatcattgttactattattactattactatcattattagtgttggcattattagtattcttcttgtcatcttgttcagaaatatacagcaatgctatacctaatactaaatacattatcatgctcgcaatggctctaacaacaacgaaccaaaatgaatttggtcgtagcttttgttcacaaaaatacataaagaaatgtctacataaatctatggcgccattggctacttgaaatagcgccagtcctcctacagattttaatatagctgtataacatgacatttattcatcatcaaaagagacagagtcaccatctgtcatatttagattttttttcatgtgttcaaagtatcctctactcatttcattataatagtttatcatacttagaattttaggacggatcaatgagtaagacttgactagatcgtcagtagtaatttgtgcatcgtctattctgcatccgcttcgtcgaataatgtatagcatcgctttgagattctccatagctatcaagtctttatacaatgacatggaaatatctgtgaatactttatacttctccaacatcgatgccttaacatcatcgcctactttagcattgaaaatacgttctattgtgtagatggatgtagcaagatttttaaacaacaatgccatcttacacgatgattgcctcaagtctccaatcgtttgtttagaacgattagctacagagtccaatgcttggctgactagcatattattatctttagaaattgtattcttcaatgaggcgtttatcatatctgtgatttcgttagtcatattacagtctgactgggttgtaatgttatccaacatatcacctatggatacggtacacgtaccagcatttgtaataatcctatctaagatgttgtatggcattgcgcagaaaatatcttctcctgtaatatctccactctcgataaatctactcagattattcttaaatgccttattctctggagaaaagatatcagtgtccatcatttcattaatagtatacgcagaaaagataccacgagtatcaattctatccaagatacttatcggttccgagtcacagataatggtttcctctccttcgggagatcctgcatagaaatatctaggacaatagtttctatactgtctgtaactctgataatctctaaagtcactaactgataccatgaaattgagaagatcaaacgctgaagtaattaatttttctgcctcgtttttactacaactagttttcatcaatgtagtgacgatgtattgtttagttacttttggtctaatactgatgatagagatattattgcttcccataatggatcttctagtagtcaccttaaagcccattgatgcgaatagcagatagataaagtcttggtatgactcctttctaatatagtacggactacctttgtcacccaactttatacccacataagccataacaacctctttaatagccgtttcatgaggtttatcagccatgagcctgagtagttggaagaatctcatgaatcccgtctcagaaagtcctatatgcatgatagatttatctttcctgggaaactctcgtatagtcatagatgaaatactctttaaagtttctgaaataagattagtaacagtcttacctccgactactctaggtaacaaacaaactctaataggtgttttctctgcggagataatatcagaaaggatagagcaataagtagtattattgtgattataaagaccgaatacataacaggtagaatttataaacatcatgtcctgaaggtttttagacttgtattcctcgtaatccataccgtcccaaaacatggatttggtaactttgatagccgtagatctttgttccttcgccaacaggttaaagaaattaataaagaatttgttgtttctatttatgtccacaaattgcacgtttggaagcgccacggttacattcactgcagcattttgaggatcgcgagtatgaagtacgatgttattgtttactggtatatctggaaagaaatctaccagtctaggaataagagattgatatcgcatagaaatagtaaagtttataatctcatcatcgaagagcattttgttaccattgtaataaatatccactctgtcatatgtataaatgaagtactgttcaaacatgatgagatgtttatatgttggcatagtagtgagatcgacgtttggtaatggcaatgtattaagattaactccataatgtctagcagcatctgcgatgttataagcgtcgtcaaagcggggtcgatcttgtattgttatatattgtctaacacctataagattatcaaaatcttgtctgcttaatacaccgttaacaatttttgccttgaattcttttattggtgcattaataacatccttatagaggatgttaaacaaataagtgttatcaaagttaagatctggatatttcttttctgctagaacatccattgagtcggagccatctggtttaatataaccaccgataaatctagctctgtattctgtatccgtcaatctaatattaagaaggtgttgagtgaaaggtggaagatcgtaaaagctgtgagtattaatgataggattagtttccgaactaatgttaattggggtattaataatatctatatttccagcgttaagtgtaacattaaacagttttaattcacgtgacgtggtatcaattaaataattaatgcccaatttggatatagcagcctgaagctcatcttgtttagttacggatcctaatgagttattaagcaatatatcgaacggatgaacgaaggttgttttaagttggtcacatactttgtaatctagacatagatgcggaagaacggtagaaactatacgaaataaatattcagagtcctctaattgatcaagagtaactattgacttaataggcatcatttatttagtattaaatgacgaccgtaccagtgacggatatacaaaacgatttaattacagagttttcagaagataattatccatctaacaaaaattatgaaataactcttcgtcaaatgtctattctaactcacgttaacaacgtggtagatagagaacataatgccgccgtagtgtcatctccagaggaaatatcctcacaacttaatgaagatctatttccagatgatgattcaccggccactattatcgaacgagtacaacctcatactactattattgacgatactccacctcctacgtttcgtagagagttattaatatcggaacaacgtcaacaacgagaaaaaagatttaatattacagtatcgaaaaatgctgaagcaataatggaatctagatctatgataacttctatgccaacacaaacaccatccttgggagtagtttatgataaagataaaagaattcagatgttagaggatgaagtggttaatcttagaaatcaacgatctaatacaaaatcatctgataatttagataattttaccaaaatactatttggtaagactccgtacaaatcaacagaagttaataagcgtatagccatcgttaattatgcaaatttgaacgggtcccccttatcagtcgaggacttggatgtttgttcggaggatgaaatagatagaatctataaaacgattaaacaatatcacgaaagtagaaaacgaaaaattatcgtcactaacgtgattattattgtcataaacattatcgagcaggcattgctaaaactcggatttgaagaaatcaaaggactgagtaccgatatcacttcagaaattatcgatgtggagatcggagatgactgcgatgctgtagcatctaaactaggaatcggtaacagtccggttcttaatattgtattgtttatactcaagatattcgttaaacgaattaaaattatttaatttaatacattcccatatccagacaacaatcgtctggattaatctgttcctgtcgtctcataccggacgacatattaatctttttattagtgggcatctttttagatggtttctttttcccagcattaactgagtcgatacctagaagatcgtgattgatctctccgaccattccacgaacttctaattggccgtctctgacggtaccataaactattttaccagcattagtaacagcttggacaatctgaccatccatcgcattgtacgatgtagtagtaactgttgttctacgtctaggagcaccagaagtatttttggagcccttggatgttgatgtagaagaagacgaggattttgattttggtttacatgtaatacattttgaactctttgattttgtatcacatgcgccggcagtcacatctgtttgagaattaagattattgttgcctcctttgacggctgcatctccaccgatttgcgctagtagatttttaagctgtggtgtaatcttattaactgtttcgatataatcatcgtaactgcttctaacggctaaattttttttatccgccatttagaagctaaaaatatttttatttatgcagaagatttaactagattatacaatgaactaatatgatccttttccagattatttacaaacttggtattttttggttctggaggaggcgaatttaaattcggacttggattcggattttgtaagttcttgatcttattatacatcgagtataggatggcgacagtaactgctacacaaataccgatcaaaagaagaataccaatcatttattgacaataacttcactattgatcaagtatgcaatatatcatcttttcactaaataagtagtaataatgattcaacaatgtcgagatatatggacgataataatttagttcatggaaatatcgctatgattggtgtgaatgactccgctaactctgtggggtgcgcagtgctttccccacatagaataaattagcattccgactgtgataataataccaagtataaacgccataatactcaatactttccatgtacgagtgggactggtagacttactaaagtcaataaaggcgaagatacacgaaagaatcaaaagaatgattccagcgattagcacgccggaaaaataatttccaatcataagcatcatgtccatttaactaataaaaattttaaatcgccgaatgaacaaagtggaatataaaccatataaaaacaatagtttgtactgcaaaaataatatctatttttgttttcgaagatatggtaaaattaaatagtagtacacagcatgttataactaacagcagcaacggctcgtaattacttatcatttactagacgaaaaggtggtgggatattttcttgctcaaataatacgaatatatcacccatccattttatgcgatgtttatatactctaatctttaatagatctatagacgacgggtttaccaacaatatagattttatcgattcatctaatttaaacccttccttaaacgtgaatgatctattatctggcataacgatgaccctacctgatgaatcggacaatgtactgggccatgtagaataaattatcaacgaattatcgtctacgaacatttatatcatttgttttaattttaggacgcgaataaatggatataaaatagaaaataacagatattacaaccagtgttatggccgcgcccaaccaggtaggcagttttattttatcttttactacaggttctcctggatgtacgtcaccaacggcggacgtagttctagtacaattagacgtaagttccgcttgggaattttttaacgctaaagagttaacgttaatcgtgcacccaacgtatttacatctagttcgttgaacatcttgattataatataaccattttctatctctagattcgtcagtgcactcatgtaaccaacataccctaggtcctaaatatttatctccggaattagattttggataattcgcgcaccaacaatttctatttcctttatgatcgttacaaaagacgtataatgccgtatccccaaaagtaaaataatcaggacgaataattctaataaactcagaacaatatctcgcatccatatgtttggagcaaatatcggaataagtagacatagccggtttccgttttgcacgtaaccattctaaacaattggggtttccaggatcgtttctacaaaatccagtcatgaaatcgtcacaatgttctgtcttgtaattattattaaatatttttggacagtgtttggtatttgtcttagaacaacattttgccacgctatcactatcgcccaggagataatccttttttataaaatgacatcgttgcccggatgctatataatcagtagcgtgttttaaatccttaatatattcaggagttacctcgttctgataatagattaatgatccaggacgaaatttgaaagaactacatggttctccatgaattaatacatattgtttagcaaattcaggaactataaaactactacaatgatctatcgacataccatctatcaaacaaaacttgggtttaatttctcccggagatgtttcataatagtacgtataactttcttctgcaaacttaacagctctattatattcaggataattaaaacctaattccatatatttgtctcgtatatctgctattcctggtgctattttgattctattaagagtaacagctgcccccattcttaataatcgtcagtatttaaactgttaaatgttggtatatcaacatctaccttatttcccgcagtataaggtttgttgcaggtatactgttcaggaatggttacatttatacttcttctatagtcctgtctttcgatgttcatcacatatgcaaagaacagaataaacaaaataatgtaagaaataatattaaatatctgtgaattcgtaaatacattgattgccataataattacagcagctacaatacacacaatagacattcccacagtgttgccattacctccacgatacatttgagttactaagcaataggtaataactaagctagtaagaggcaatagaaaagatgagataaatatcatcaatatagagattagaggagggctatatagagccaagacgaacaaaatcaaaccgagtaacgttctaacatcattatttttgaagattcccaaataatcattcattcctccataatcgttttgcatcatacctccatctttaggcataaacgattgctgctgttcctctgtaaataaatctttatcaagcactccagcacccgcagagaagtcgtcaagcatattgtaatatcttaaataactcatttatatattaaaaaatgtcactattaaagatggagtataatctttatgccgaactaaaaaaaatgacttgtggtcaacccctaagtctttttaacgaagacggggatttcgtagaagttgaaccgggatcatcctttaagtttctgatacctaagggattttacgcctctccttccgtaaagacgagtctagtattcgagacattaacaacgaccgataataaaatcactagtatcaatccaacaaatgcgccaaagttatatcctcttcaacgcaaagtcgtatctgaagtagtttctaatatgaggaaaatgatcgaatcaaaacgtcctctatacatcactcttcacttggcgtgtggatttggtaagactattaccacgtgttatcttatggctacacacggtagaaaaaccgtcatttgcgtacccaataaaatgttaatacatcaatggaagacacaggtagaggcagtcggattggaacataagatatccatagatggagtaagtagtctattaaaggaactaaagactcaaagtccggatgtattaatagtagtcagtagacatctgacaaacgatgccttttgtaaatatatcaataagcattatgatttgttcatcttggatgaatcacatacgtataatctgatgaacaatacagcagttacaagatttttagcgtattatcctccgatgatgtgttattttttaactgctacacctagaccatctaaccgaatttattgtaacagtattattaatattgccaagttatccaatctaaaaaaaactatctatgcagtagatagtttttttgagccatattccacagataatattagacatatggtaaaacgactagatggaccatctaataaatatcatatatataccgagaagttattatctgtagacgagcctagaaatcaacttattcttgataccctggtagaagaattcaagtcaggaactattaatcgcattttagttattactaaactacgtgaacatatggtattattctacaaacgattattagattttttcggaccagaggttgtatttataggagacgcccaaaatagacgtactccagatatggtcaaatcaatcaaggaactaaatagatttatattcgtatccaccttattttattccggtactggtttagatattcctagtttggattcgttgttcatttgctcggcagtaatcaacaatatgcaaatagagcaattactagggagggtatgtcgagaaacagaactattagataggacggtatatgtatttcctaacacatccatcaaagaaataaagtacatgataggaaatttcatgcaacgaattattagtctgtctgtagataaactaggatttaaacaaaaaagttatcggaaacatcaagaatccgatcccacttctgcatgtacaacatcatccagagaagaacgtgtattaaatagaatatttaactcgcaaaatcgttaagaagtttaagcgacgatccgcatgctgcgcaggccagtgtattacccctcatagtattaatataatccaatgatacttttgtgatgtcggaaatcttaaccaatttagactgacaggcagaacacgtcatgcaatcatcatcgtcatcgataactgtagtcttgggcttctttttgcgactcttcattccggaacgcacattggtgctatccatttaggtagtaaaaaataagtcagaatatgccctataacacgatcgtgcaaaacctggtatatcgtctctatctttatcacaatatagtgtatcgacatttttattattattgacctcgtttatcttggaacatggaatgggaacatttttgttatcaacggccatctttgccttaattccagatgttgtaaaattataactaaacagtctatcatcgacacaaatgaaattcttgtttagacgtttgtagtttacgtatgcggctcgttcgcgtctcattttttcagatattgcaggtactataatattaaaaataagaatgaaataacataggattaaaaataaagttatcatgacttctagcgctgatttaactaacttaaaagaattacttagtctgtacaaaagtttgagattttcagattctgcggctatagaaaagtataattctttggtagaatggggaacatctacttactggaaaataggcgtgcaaaaggtagctaatgtcgagacgtcaatatctgattattatgatgaggtaaaaaataaaccgtttaatattgatccgggctattacattttcttaccggtatattttgggagcgtctttatttattcgaagggtaaaaatatggtagaacttggatctggaaactcttttcaaataccagatgatatgcgaagtgcgtgtaacaaagtattagacagcgataacggaatagactttctgagatttgttttgttaaacaatagatggataatggaagatgctatatcaaaatatcagtctccagttaatatatttaaactagctagtgagtacggattaaacatacccaaatatttagaaattgaaatagaggaagacacattatttgacgacgagttatactctattatagaacgctctttcgatgataaatttccaaaaatatccatatcgtatattaagttgggagaacttagacggcaagttgtagactttttcaaattctcattcatgtatattgagtccatcaaggtagatcgtataggagataatatttttattcctagcgttataacaaaatcaggaaaaaagatattagtaaaagatgtagaccatttaatacgatccaaggttagagaacatacatttgtaaaagtaaaaaagaaaaacacattttccattttatacgactatgatggaaacggaacagaaactagaggagaagtaataaaacgaattatagacactataggacgagactattatgttaacggaaagtatttctctaaggttggtagtgcaggcttaaagcaattgactaataaattagatattaatgagtgcgcaactgtcgatgagttagttgatgagattaataaatccggaactgtaaaacgaaaaataaaaaaccaatcagcatttgatttaagcagagaatgtttgggatatccagaagcggattttataacgttagttaataacatgcggttcaaaatagaaaattgtaaggttgtaaatttcaatattgaaaatactaattgtttaaataacccgagtattgaaactatatatggaaactttaaccagttcgtctcaatctttaatgtcgtcaccgatgtcaaaaaaagattattcgagtgaaataatatgcgcctttgatataggtgcaaaaaatcctgccagaactgttttagaagtcaaggataactccgttagggtattggatatatcaaaattagactggagttctgattgggaaaggcgcatagctaaagatttgtcacaatatgaatacactacagttcttctagaacgtcagcctagaaggtcgccgtatgttaaatttatctattttattaaaggctttttatatcatacatcggctgccaaagttatttgcgtctcgcctgtcatgtctggtaattcatatagagatcgaaaaaagagatcggtcgaagcatttcttgattggatggacacattcggattgcgagactccgttccggatagacgcaaattagacgatgtagcggatagtttcaatttggctatgagatacgtattagataaatggaatactaattatacaccttataataggtgtaaatctagaaattacataaaaaaaatgtaataacgttagtaacgccattatggataatctatttacctttctacatgaaatagaagatagatatgccagaactatttttaactttcatctaataagttgcgatgaaataggagatatatatggtcttatgaaagaacgcatttcctcagaggatatgtttgataatatagtgtataataaagatatacatcctgccattaagaaactagtgtattgcgacatccaacttactaaacacattattaatcagaatacgtatccggtatttaacgattcttcacaagtgaaatgttgtcattatttcgacataaactcagataatagcaatattagctctcgtacagtagagatatttgagagggaaaagtcatctcttgtatcatatattaaaactaccaataagaagagaaaggtcaattacggcgaaataaagaaaactgttcatggaggcactaatgcaaattacttttccggtaaaaagtctgacgagtatctgagtactacagttagatccaacattaatcaaccttggatcaaaaccatctctaagaggatgagagttgatatcattaatcactctatagtaacgcgtggaaaaagctctatattacaaactatagaaattatttttactaatagaacatgtgtgaaaatattcaaggattctactatgcacattattctatccaaggacaaggatgaaaaggggtgtatacacatgattgacaaattattctatgtctattataatttatttctgttgttcgaagatatcatccaaaacgagtactttaaagaagtagctaatgttgtaaaccacgtactcacggctacggcattagatgagaaattattcctaattaagaaaatggctgaacacgatgtttatggagttagcaatttcaaaatagggatgtttaacctgacatttattaagtcgttggatcataccgttttcccctctctgttagatgaggatagcaaaataaagttttttaaggggaaaaagctcaatattgtagcattacgatctctggaggattgtataaattacgtgactaaatccgagaatatgatagaaatgatgaaggaaagatcgactattttaaatagcatagatatagaaacggaatcggtagatcgtctaaaagaattgcttctaaaatgaaaaaaaacactaattcagaaatggatcaacgactagggtataagtttttggtgcctgatcctaaagccggagttttttatagaccgttacatttccaatatgtatcgtattctaattttatattgcatcgattgcatgaaatcttgaccgtcaagcggccactcttatcgtttaagaataatacagaacgaattatgatagaaattagcaatgttaaagtgactcctccagattactcacctataatcgcgagtattaaaggtaagagttatgacgcattagccacgttcactgtaaatatctttaaagaggtaatgaccaaagagggtatatccatcactaaaataagtagttatgagggaaaagattctcatttgataaaaattccgctactaataggatacgggaataaaaatccacttgatacagccaagtatcttgttcctaatgtcataggtggagtctttatcaataaacaatctgtcgaaaaagtaggaattaatctagtagaaaagattacaacatggccaaaatttagggttgttaagccaaactcattcactttctcgttttcctccgtatcccctcctaatgtattaccgacaagatatcgccattacaagatatctctggatatatcacaattggaagcgttgaatatatcatcgacaaagacatttataacggtcaatattgttttgctgtctcaatatttatctagagtgagtctagaattcattagacgtagtttatcatacgatatgcctccagaagttgtctatctagtaaacgcgataatagatagtgctaaacgaattactgaatctattactgactttaatattgatacatacattaatgacctggtggaagctgaacacattaaacaaaaatctcagttaacgatcaacgagttcaaatatgaaatgctgcataactttttacctcatatgaactatacacccgatcaactaaagggattttatatgatatctttactaagaaagtttctctactgtatcttccacacttctagatatccagatagagattcgatggtttgtcatcgcatcctaacgtacggcaaatattttgagacgttggcacatgatgaattagagaattacataggcaacatccgaaacgatatcatgaacaatcacaagaacagaggcacttacgcggtaaacattcatgtactaacaactcccggacttaatcacgcgttttctagcttattgagtggaaagttcaaaaagtcagacggtagttatcgaacacatcctcactattcatggatgcagaatatttctattcctaggagtgttggattttatccggatcaagtaaagatttcaaagatgttttctgtcagaaaataccatccaagtcaatatctttacttttgttcatcagacgttccggaaagaggtcctcaggtaggtttagtatctcaattgtctgtcttgagttccattacaaatatactaacgtctgagtatttggatttggaaaagaaaatttgtgagtatatcagatcatattataaagatgatataagttactttgaaacaggatttccaatcactatagaaaatgctctagtcgcatctcttaatccaaatatgatatgtgattttgtaactgactttagacgtagaaaacggatgggattcttcggtaacttggaggtaggtattactttagttagggatcacatgaatgaaattcgcattaatattggagcgggaagattagtcagaccattcttggttgtggataacggagagctcatgatggatgtgtgtccggagttagaaagcagattagacgacatgacattctctgacattcagaaagagtttccgcatgtcatcgaaatggtagatatagaacaatttacttttagtaacgtatgtgaatcggttcaaaaatttagaatgatgtcaaaggatgaaagaaagcaatacgatttatgtgactttcctgccgaatttagagatggatatgtagcatcttcattagtgggaatcaatcacaattctggacccagagctattcttggatgtgctcaagctaaacaagctatctcttgtctgagctcggatatacgaaataaaatagacaatggaattcatttgatgtatccagagaggccaatcgtgattagtaaggctttagaaacttcaaagattgcggctaattgcttcggccaacatgttactatagcattaatgtcgtacaaaggtatcaatcaagaggatggaattatcatcaaaaaacaatttattcagagaggcggtctcgatattgttacagccaagaaacatcaagtagaaattccattggaaaactttaataacaaagaaagagataggtctaacgcctattcaaaattagaaagtaatggattagttagactgaatgctttcttggaatccggagacgctatggcacgaaatatctcatcaagaactcttgaagatgattttgctagagataatcagattagcttcgatgtttccgagaaatataccgatatgtacaaatctcgcgttgaacgagtacaagtagaacttactgacaaagttaaggtacgagtattaaccatgaaagaaagaagacccattctaggagacaaatttaccactagaacgagtcaaaagggaacagtcgcgtatgtcgcggatgaaacggaacttccatacgacgaaaatggtatcacaccagatgtcattattaattctacatccatcttctctagaaaaactatatctatgttgatagaagttattttaacagccgcatattctgctaagccgtacaacaataagggagaaaaccgacctgtctgttttcctagtagtaacgaaacatccatcgatacatatatgcaattcgctaaacaatgttatgagcattcaaatccgaaattgtccgatgaagaattatcggataaaatcttttgtgaaaagattctctatgatcctgaaacggataagccttatgcatccaaagtattttttggaccaatttattacttgcgtctgaggcatttaactcaggacaaggcaaccgttagatgtagaggtaaaaagacgaagctcattagacaggcgaatgagggacgaaaacgtggaggaggtatcaagttcggagaaatggagagagactgtttaatagcgcatggtgcagccaatactattacagaagttttgaaagattcggaagaagattatcaagatgtgtatgtttgtgaaaattgtggagacatagcagcacaaatcaagggtattaatacatgtcttagatgttcaaaacttaatctctctcctctcttaacaaaaattgataccacgcacgtatctaaagtatttcttactcaaatgaacgccagaggcgtaaaagtcaaattagatttcgaacgaaggcctccttcgttttataaaccattagataaagttgatctcaagccgtcttttctggtgtaatattctagtttggtagtagatacatatcaatatcatcaaattcgagatccgaattataaaatgggcgtggattgttaactatagaatcggacgtctgatattcgaaaatctgtggagtttcaggttttggtggaggtgtaactgctacttgggatactgaagtctgatattcagaaagctgtggatgttctggttcggcatccaccgatggtgtcacatcactaatcggttcggtaacgtctgtggatggaggtgctacttctacagaacctgtagcctcagttgtcaacggagatacatttttaatgcgagaaaatgtataatttggtaatggtttcttatgtggatctgaagaagaggtaagatatctactagaaagataccgatcacgttctagttctcttttgtagaacttaactttttctttctccgcatctagttgatattccaacctcttcacgttactacgttcagattccaattcacgttcgcatgggttacctccgcagtttttacgagcgatttcacgttcagccttcatgcgtctctccctctctctatcgagtttatcagagcagtctttctgaaggcgatcgaactccataaatttctccaacgctttgattgtttccatagatttccgaagttcagcttttaggactgtgattctttttctttcgaattcacagctggatgtacaaccgtttccattaccgccatctctaagtttcttttctagatcggcaacatttcatccccatgccttttacattcctcgagtctactgtcgtcgaaatatcgttccagctccttttcgacatcaataactttagcacgttgtctctcaagctctcttttgtagttatctgattccctggcacgtttaagatcttcatgcaattgagtcagctcttaacttcctctcttgcttcttcgtcatagtacgcgcaatcactgtgagatccattgttaccacgtctacactcggcgagctcgcgtttaagagattcaatttcccgtttgtattggtccatgtttccattgctaccaccattagatttacaggctgctagttgtcgttcgagatcagaaatacgggttttcttggaattgatttcgtcgatgtacttggcatcgaaacacttattaagttctttttccaattctacgattttatttctttcgcgagtcaattccctcctgtagtaactatctgttttgtcagattcacgctctctacgtagactttcttgcaagttactaatttgttccctagcacgtccgagtttagttttatatgctgaatagagttctgattcatcctttgagcagatctctagcgatcgtttaagattcctaattctagtctttagcctatttacctcctcagaagatgttccgttaccgttgcgtttacactcgttaagctgtctatcaagatccatgattctatctctaagacgttgcatctctctttccatatcagcattgctttcattattacgtctgcagtcactcaactgtctttcaatatctgagattctatctctaagacgtcgcatctctctctgtttcggcattggtttcattattacgtttacagtcgttcaactgtctttcaagatctgatattctagattggagtctgctaatctctgtagcattttcacggcattcactcagttgtctttcaagatctgaaattttagattggagtctgctaatctctgtaagatttcctcctccgctctcgatgcagtcggtcaacttattctctagttctctaatacgcgaacgcagtgcatcaacttcttgcgtgtcttcctggttgcgtgtacattcatcgagatctctaacgcgtcgtcgttcttcctcaagttctctgcgtactacagaaagcgtgtccctatcttgttgatatttagcaatttctgattctagagtactgattttgcttacgtagttactaatagttgtcttggccttatcaagatcctccttgtatttgtcgcattccttgatatccctacgaagtctggacagttcccattcgacattacgacgtttatcgatttcagctcggagatcgtcatcgcgttgttttagccacatacgactgagttcaagttctcgttgacaagatccatctacttttccattcctaatagtatccagttccttttctagttctgaacgcatttctcgttccctatcaagcgattctctcaattctcggatagtcttcttatcaatttctaataaatctgaaccatcatctgtcccattttgaatatccctgtgttctttgatctcttttgtaagtcggtcgattctttcggttttataaacagaatccctttccaaagtcctaatcttactgagtttatcactaagttctgcattcaattcggtgagttttctcttggcttcttccaactctgttttaaactctccactatttccgcattcttcctcgcatttatctaaccattcaattagtttattaataactagttggtaatcagcgattcctatagccgttcttgtaattgtgggaacataattaggatcttctaatggattgtatggcttgatagcatcatctttatcattattagggggatggacaaccttaattggttggtcctcatctcctccagtagcgtgtggttcttcaataccagtgttagtaataggcttaggcaaatgcttgtcgtacgcgggcacttcctcatccatcaagtatttataatcgggttctacttcagaatattcttttctaagagacgcgacttcgggagttagtagaagaactctgtttctgtatctatcaacgctggaatcaatactcaagttaaggatagcgaatacctcatcgtcatcatccgtatcttctgaaacaccatcatatgacatttcatgaagtctaacgtattgataaatagaatcagatttagtattaaacagatccttaacctttttagtaaacgcatatgtatattttagatctccagatttcataatatgatcacatgccttaaatgtcagtgcttccatgatataatctggaacactaatgggtgacgaaaaagatacagcaccatatgctacgttgataaataaatctgaaccactaagtagataatgattaatgttaagaaagaggaaatattcagtgtataggtatgtcttggcgtcatatcttgtactaaacacgctaaacagtttgttaatgtgatcaatttccaatagattaattagagcagcgggaataccaacaaacatattaccacatccgtattttctatgaatatcacatatcatgttaaaaaatcttgatagaagagcgaatatctcgtctgacttaatgagtcgtagttcagcagcaacataagtcataactgtaaatagaacatactttcctgtagtgttgattctagactccacatcaacaccattattaaaaatagttttatatacatctttaatctgctctccgttaatcgtcgaacgttctagtatacggaaacactttgatttcttatctgtagttaatgacttagtgatatcacgaagaatattacgaattacatttcttgtttttcttgagagacctgattcagaactcaactcatcgttccatagtttttctacctcagtggcgaaatctttggagtgcttggtacatttttcaataaggttcgtgacctccatttattataaaaaatttattcaaaacttaactacaatcgggtaattataagatcgtagatctcccatgtggcggaatactaccatctatcgcatgtggatggacagtaggtaatggccatgggaacagtaatgtttgcatatttatctttcttgctagtattactgcatattgtcccaatgtttcgatgtgatgttctaacctatcaactgccgctgtatcacaacaatagtgtccgatgaaattaagattatgatccaatgtgtttaatatatgattatcaagtcttatacgatccgcgtcttttttgacaggatcaggttcttctacaggaagaagtttcggcctcttatgatattcatgtctgggaaacggtggtctagggtgaggctccggtatcggagtgggttttggattataatcatcatcgtctatgacatcatcttcgacttcgatatttattttgctatcttgatgatgtcctgtatcagttgcattttcagcactcgactgaatattagcgcattcattgtctattattaccatatttctaaacccaaaatgtatgtgttgaacatcagtactatcgttgatgagtcttatagcatgaattcgcttatcgttatcgggtttatcttctgtcaccttagcaattccttttttattaaactctacataatcatatccatttctattgtttgttctaatataaacgagtatagcatcattgctaaatttttcaatagtatcaaaaacagaatatcctaaaccatataatatatattcaggaacactcaaactaaatgtccaggattctcctaaatacgtaaactttaatagtgcgaaatcattcaaaaatctaccacttatagatagatagtacataaatgcgtatagtagtctacctatctctttattatgaaaaccggcattacgatcatatatgtcgtgatatacctgtgatccgtttacgttaaaccataaatacatgggtgatcctataaacatgaatttatttctaattctcagagctatagttaattgaccgtgtaatatttgcttacatgcatacttgatacgcttattaataagatttttatcattgctcgttatttcagaatcgtatatataaggagtaccatcgtgattcttaccagatattatacaaaatactatatataaaatatattgacccacgttagtaatcatataaatgtttaacgttttaaattttgtattcaatgatccattatcatacgctatcatggtcttgtaatattcattctttaaaatataatattgtgttagccattgcattggagctcctaatggagattttctattctcatccattttaggataggctttcataaagtccctaataacttcgtgaataatgtttctatgttttctactgatgcatgtatttgcttcgatttttttatcccatgtttcatctatcatagatttaaacgcagtaatgctcgcaacattaacatcttgaaccgttggtacaattccgttccataaatttataatgttcgccatttatataactcattttttgaatatacttttaattaacaaaagagttaagttactcatatggacgccgtccagtctgaacatcaatctttttagccagagatatcatagccgctcttagagtttcagcgtgattttccaacctaaatagaacttcatcgttgcgtttacaacacttttctatttgttcaaactttgttgttacattagtaatctttttttccaaattagttagccgttgtttgagagtttcctcattgtcgtcttcatcggctttaacaattgcttcgcgtttagcctctggctttttagcagcctttgtagaaaaaaattcagttgctggaattgcaagatcgtcatctccggggaaaagagttccgtccatttaaagtacagattttagaaactgacactctgcgttatttatatttggtacaacacatggattataaatattgatgttaataacatcagaaaatgtaaagtctatacattgttgcatcgtgttaaattttctaatggatctagtattattgggtccaacttctgcctgaaatccaaatatggaagcggatacaaaaccgtttcctggataaaccacacatctccacttttgctttacatcagaaattgtgtcgttgacatcttgaactctcctatctaatgccggtgttccacctatagattttgaatattcgaatgctgcatgagtagcattaaattccttaatattgccataattttcatatattgagtaaccctggataaaaagtaaacacaccgcagccgtcgctaccacaataaaaaaaattgatagagagttcatttataatctattagaagctgacaaaatttttttacacgcatcagacaatgctttaataaatagttcaacatctacttttgtcatatcgaaccgatggtatgattctaacctagaattacatccgaaaaagttgactatgttcatagtcattaagtcattaacaaacaacattccagactctggattataagacgatactgtttcgtcacaattacctaccttaatcatgtgattatgaatattggctattagagcaccttctaagaaatctataatatctttgaaacacgatttaaaatcaaaccacgaatatacttctacgaagaaagttagtttacccataggagaaataactataaatggagatctaaatacaaaatccggatctatgatagttttaacattattatattctctattaaatacctccacatctaaaaatgttaattttgaaactatgtcttcgtttattaccgtacctgaactaaacgctataagctctattgtttgagaactctttaaacgatattcttgaaatacatgtaacaaagtttcctttaactcggtcggtttatctaccatagttacagaatttgtatccttatctataatataataatcaaaatcgtataaagttatataattatcgcgttcagattgtgatcttttcaaatagactaaaaaccccatttctctagtaagtatcttatgtatatgtttgtaaaatatcttcatggtgggaatatgctctaccgcagttagccattcctcattgacagcggtagatgtattagacaaaactattccaatgtttaacaagggccattttacgagattattaaatccttgtttgataaatgtagccaatgagggttcgagttcaacgacgattgaattctcttcccgcggatgctgcatgatgaacgacgggatgttgttcgattgatttggaattctttttcgactttttgtttatattaaatattttaaaatttatagcggatagcaattcatgtaccacggataatgtagacgcgtattgcgcatcgatatctttattattagataaatttatcaataaatgtgagaagtttgcctcgttaaggtcttccatttaaatattatataaacatttgtgtttgtatcttattcgtcttttatggaatagttttttactagtaaagctgcaattacacactttgtccgtaaaacataaatataaacaccagcttttatcaatcgttccaaaaagtcgacggcggacatttttaacatggcatctattttaaatacacttaggtttttggaaaaaacatcattttataattgtaacgattcaataactaaagaaaagattaagattaaacataagggaatgtcatttgtattttataagccaaagcattctaccgttgttaaatacttgtctggaggaggtatatatcatgatgatttggttgtattggggaaggtaacaattaataatctaaagatgatgctattttacatggatttatcatatcatggagtgacaagtagtggagcaatttacaaattgggatcgtctatcgatagactttctctaaataggactattgttacaaaagttaataattatgatgatacattttttgacgacgatgattgatcgctattgcacaattttgtttttgtactttctaatatagtgtttaggttctttttcatatgagaatattgatttactaaaatatctatgtttaacttttgttctatgacgtccttatcggcggtatcggtacatatacgtaattcaccttcacaaaatacggagtcttcgataataatagccaatcgattattggatctagctgtctgtatcatattcaacatgtttaatatatcctttcgtttcccctttacaggcatcgatcgtagcatattttccgcgtctgatatggaaatgttaaaactacaaaaatgcgtaatgttagcccgtcctaatattggtacgtgtctataagtttggcatagtagaataatagacgtgtttaaatgccttccaaagtttaagaattctattagagtattgcattttgatagtttatcgcctacatcatcaaaaataagtaaaaagtgtgctgattttttatgattttgtgcgacagcaatacatttttctatgttacttttagttcgtatcagattatattctagagattcctgactactaacgaaattaatatgatttggccaaatgtatccatcataatctgggttataaacgggtgtaaacaagaatatatgtttatattttttaactagtgtagaaaacagagatagtaaatagatagtttttccagatccagatcctcctgttaaaaccattctaaacggcatttttaataaattttctcttgaaaattgtttttcttggaaacaattcataattatatttacagttactaaattaatttgataataaatcaaaatatggaaaactaaggttgttagtagggaggagaacaaagaaggcacatcgtgatataaataacatttattatcatgatgacaccagaaaacgacgaagagcagacatctgtgttctccgctactgtttacggagacaaaattcagggaaagaataaacgcaaacgcgtgattggtctatgtattagaatatctatggttatttcactactatctatgattaccatgtccgcgtttctcatagtgcgcctaaatcaatgcatgtctgctaacgaggctgctattactgacgccgctgttgccgttgctgctgcatcatctactcatagaaaggttgcgtctagcactacacaatatgatcacaaagaaagctgtaatggtttatattaccagggttcttgttatatattacattcagactaccagttattctcggatgctaaagcaaattgcactgcggaatcatcaacactacccaataaatccgatgtcttgactacctggctcattgattatgttgaggatacatggggatctgatggtaatccaattacaaaaactacatccgattatcaagattctgatgtatcacaagaagttagaaagtatttttgtgttaaaacaatgaactaatatttatttttgtacattaataaatgaaatcgcttaatagacaaactgtaagtaggtttaagaagttgtcggtgccggccgctataatgatgatactctcaaccattattagtggcataggaacatttctgcattacaaagaagaactgatgcctagtgcttgcgccaatggatggatacaatacgataaacattgttatttagatactaacattaaaatgtctacagataatgcggtttatcagtgtcgtaaattacgagctagattgcctagacctgatactagacatctgagagtattgtttagtattttttataaagattattgggtaagtttaaaaaagaccaatgataaatggttagatattaataatgataaagatatagatattagtaaattaacaaattttaaacaactaaacagtacgacggatgctgaagcgtgttatatatacaagtctggaaaactggttaaaacagtatgtaaaagtactcaatctgtactatgtgttaaaaaattctacaagtgacaacaaaaaatgaattaataataagtcgttaacgtacgccgccatggacgccgcgtttgttattactccaatgggtgtgttgactataacagatacattgtatgatgatctcgatatctcaatcatggactttataggaccatacattataggtaacataaaaactgtccaaatagatgtacgggatataaaatattccgacatgcaaaaatgctactttagctataagggtaaaatagttcctcaggattctaatgatttggctagattcaacatttatagcatttgtgccgcatacagatcaaaaaataccatcatcatagcatgcgactatgatatcatgttagatatagaagataaacatcagccattttatctattcccatctattgatgtttttaacgctacaatcatagaagcgtataacctgtatacagctggagattatcatctaatcatcaatccttcagataatctgaaaatgaaattgtcgtttaattcttcattctgcatatcagacggcaatggatggatcataattgatgggaaatgcaatagtaattttttatcataaaagttgtaaagtaaataataaaacaataaatattgaactagtagtacgtatattgagcaatcagaaatgatgctggtacctcttatcacggtgaccgtagttgcgggaacaatattagtatgttatatattatatatttgtaggaaaaagatacgtactgtctataatgacaataaaattatcatgacaaaattaaaaaagataaagagttctaattccagcaaatctagtaaatcaactgatagcgaatcagactgggaggatcactgtagtgctatggaacaaaacaatgacgtagataatatttctaggaatgagatattggacgatgatagcttcgctggtagtttaatatgggataacgaatccaatgttatggcgcctagcacagaacacatttacgatagtgttgctggaagcacgctgctaataaataatgatcgtaatgaacagactatttatcagaacactacagtagtaattaatgaaacggagactgttgaagtacttaatgaagataccaaacagaatcctaactattcatccaatcctttcgtaaattataataaaaccagtatttgtagcaagtcaaatccgtttattacagaacttaacaataaatttagtgagaataatccgtttagacgagcacatagcgatgattatcttaataagcaagaacaagatcatgaacacgatgatatagaatcatcggtcgtatcattggtgtgattagtttcctttttataaaattgaagtaatatttagtattattgctgccgtcacgttgtacaaatggagatattccctgtattcggcatttctaaaattagcaattttattgctaataatgactgtagatattatatagatacagaacatcaaaaaattatatctgatgagatcaatagacagatggatgaaacggtacttcttaccaacatcttaagcgtagaagttgtaaatgacaatgagatgtaccatcttattcctcatagattatcgacgattatactctgtattagttctgtcggaggatgtgttatctctatagataatgacatcaatggcaaaaatattctaacctttcccattgatcatgctgtaatcatatccccactgagtaaatgtgtcgtagttagcaagggtcctacaaccatattggttgttaaagcggatatacctagcaaacgattggtaacatcgtttacaaacgacatactatatgtaaacaatctgtcactgattaattatttgccgttgtctgtattcattattagacgagtcaccgactatttggatagacacatatgcgatcagatatttgctaataataagtggtattcccttataaccatcgacgataagcaatatcctattccatcaaactgtataggtatgtcctctgccaagtacataaattctagcatcgagcaagatactttaatccatgtttgtaacctcgagcatccgttcgactcagtatacaaaaaaatgcagtcgtacaattctctacctatcaaggaacaaatattgtacggtagaattgataatataaatatgagcattagtatttctgtggattaatagatttctagtatggggatcattaatcatctctaatctctaaatacctcataaaacgaaaaaaaagctattatcaaatactgtacggaatggattcattctcttctctttttatgaaactctgttgtatatctactgataaaactggaagcaaaaaatctgatagaaagaataagaataagatcaaggattatatggaacacgattattataaaataacaatagttcctggttcctcttccacgtctactagctcgtggtattatacacatgcctagtaatagtctctttgcgttgacggaaagcagactagaaataacaggctaaaatgttcagacaccataatagttcccaacccagataataacagagttccatcaacacattcctttaaactcaatcccaaacccaaaaccgttaaaatgtatccggccaattgatagtagataatgaggtgtacagcgcatgataatttacacagtaaccaaaatgaaaatactttagtaattataagaaatatagacggtaatgtcatcatcaacaatccgataatatgcctgagagtaaacattgacggataaaacaaaaatgctccgcataactctatcatggcaataacacaaccaaatacttgtaagattcctaaattagtagaaaatacaacgaatatcgatgtataagtgatctcgagaaataataagaataaagtaatgcccgtaaagataaacatcaacattgtttggtaatcattaaaccaattagtatgaagttgaactaatttcacagtagattttattccagtgttatcctcgcatgtataagtacctggtaagatatctttatattccataatcaatgagacatcactatctgataacgaatgaagtctagcactagtatgccatttacttaatattgtcgtcttggaagttttattataagttaaaatatcatggttatccaatttccatctaatatactttgtcggattatctatagtacacggaataatgatggtatcattacatgctgtatactctatggtctttgtagttgttataacaaccaacgtatagaggtatatcaacgatattctaactcttgacattttttatttatttaaaatgatacctttgttatttattttattctattttgctaacggtattgaatggcataagtttgaaacgagtgaagaaataatttctacttacttattagacgacgtattatacacgggtgttaatggggcggtatacacattttcaaataataaactaaacaaaactggtttaactaataataattatataacaacatctataaaagtagaggatgcggataaggatacattagtatgcggaaccaataacggaaatcccaaatgttggaaaatagacggttcagacgacccaaaacatagaggtagaggatacgctccttatcaaaatagcaaagtaacgataatcagtcacaacggatgtgtactatctgacataaacatatcaaaagaaggaattaaacgatggagaagatttgacggaccatgtggttatgatttattcacggcggataacgtaattccaaaagatggtttacgaggagcattcgtcgataaagacggtacttatgacaaagtttacattcttttcactgatactatcggctcaaagagaattgtcaaaattccgtatatagcacaaatgtgcctaaacgacgaaggtggtccatcatcattgtctagtcatagatggtcgacgtttctcaaagtcgaattagaatgtgatatcgacggaagaagttatagacaaattattcattctagaactataaaaacagataatgatacgatactatatgtattcttcgatagtccttattccaagtccgcattatgtacctattctatgaataccattaaacaatctttttctacgtcaaaattggaaggatatacaaagcaattgccgtctccagctcctggtatatgtttaccagctggaaaagttgttccacataccacgtttgaagtcatagaacaatataatgtactagatgatattataaagcctttatctaaccaacctatcttcgaaggaccgtctggtgttaaatggttcgatataaaggagaaggaaaatgaacatcgggaatatagaatatacttcataaaagaaaattctatatattcgttcgatacaaaatctaaacaaactcgtagctcgcaagtcgatgcgcgactattttcagtaatggtaactgcgaaaccgttatttatagcagatatagggataggagtaggaatgccacaaatgaaaaaaatacttaaaatgtaatcttaatcgagtacaccacacgacaatgaacaaacataagacagattatgctggttatgcttgctgcgtaatatgcggtctaattgtcggaattatttttacagcgacactattaaaagttgtagaacgtaaattagttcatacaccattaatagataaaacgataaaagatgcatatattagagaagattgtcctactgactggataagctataataataaatgtatccatttatctactgatcgaaaaacctgggaggaaggacgtaatgcatgcaaagctctaaattcaaattcggatctaattaagatagagactccaaacgagttaagttttttaagaagccttagacgaggctattgggtaggagaatccgaaatattaaaccagacaaccccatataattttatagctaagaatgccacgaagaatggaactaaaaaacggaaatatatttgtagcacaacgaatactcccaaactgcattcgtgttacactatataacaattacactacatttttatcataccactacttcggttagatgttttagaaaaaaataaatatcgccgtaccgttcttgtttttataaaaataacaattaacaattatcaaattttttctttaatattttacgtggttgaccattcttggtggtaaaataatctcttagtgttggaatggaatgctgtttaatgtttccacactcatcgtatattttgacgtatgtagtcacatcgtttacgcaatagtcagactgtagttctatcatgcttcctacatcagaaggaggaacagttttaaagtctcttggttttaatctattaccgttagttttcatgaaatcctttgttttatccacttcacattttaaataaatgtccactatacattcttttgttaattttactagatcgtcatgggtcatagaatttataggttccgtagtccatggatccaaactagcaaacttcgcgtatacggtatcgcgattagtgtatacaccaactgtatgaaaattaagaaaacagtttaataaatcaacagaaatatttaatcctccgtttgatacagatgcgccatatttatggatttcggattcacacgttgtttgtctgaggtgttcgtctagtgttgcttctacgtaaacttcgattcccatatattctttattgtcagaatcgcataccgatttatcatcatacactgtttgaaaactaaatggtatacacatcaaaataataaataataacgagtacattctgcaatattgttatcgtaattggaaaaatagtgttcgagtgagttggattatgtgagtattggattgtatattttattttatattttgtaataagaataaaatgctaatgtcaagtttattccaatagatgtcttattaaaaacatatataataaataacaatggctgaatggcataaaattatcgaggatatctcaaaaaataataagttcgaggatgccgccatcgttgattacaagactacaaagaatgttctagctgctattcctaacagaacatttgccaagattaatccgggtgaaattattcctctcatcactaatcgtaatattctaaaacctcttattggtcagaaatattgtattgtatatactaactctctaatggatgagaacacgtatgctatggagttgcttactgggtacgcccctgtatctccgatcgttatagcgagaactcataccgcacttatatttttgatgggtaagccaacaacatccagacgtgacgtgtatagaacgtgtagagatcacgctacccgtgtacgtgcaactggtaattaaaataaaaagtaatattcatatgtagtgtcaattttaaatgatgatgatgaaatggataatatccatattgacgatgtcaataatgccggtattggcatacagttcatcgatttttagatttcattcagaggatgtggaattatgttatgggcatttgtattttgataggatctataatgtagtaaatataaaatataatccgcatattccatatagatataattttattaatcgcacgttaaccgtagatgaactagacgataatgtcttttttacacatggttattttttaaaacacaaatatggttcacttaatcctagtttgattgtctcattatcaggaaacttaaaatataatgatatacaatgctcagtaaatgtatcgtgtctcattaaaaatttggcaacgagtacatctactatattaacatctaaacataagacttattctctacatcggtccacgtgtattactataataggatacgattctattatatggtataaagatataaatgacaagtataatgacatctatgattttactgcaatatgtatgctaatagcgtctacattgatagtgaccatatacgtgtttaaaaaaataaaaatgaactcttaattatgctatgctattagaaatggataaaatcaaaattacggttgattcaaaaattggtaatgttgttaccatatcgtataacttggaaaagataactattgatgtcacacctaaaaagaaaaaagaaaaggatgtattattagcgcaatcagttgctgtcgaagaggcaaaagatgtcaaggtagaagaaaaaaatattatcgatattgaagatgacgatgatatggatgtagaaagcgcgtaatacgatctataaaaataagtatataaatactttttatttactgtactcttactgtgtagtggtgataccctactcgattatttttttaaaaaaaaaatacttattctgattcttctagccatttccgtgttcgtttgaatgccacatcgacgtcaaagataggggagtagttgaaatctagttctgcattgttggtacgcacctcaaatgtagtgttggatatcttcaacgtatagttgttgagtagtgatggttttctaaatagaattctcttcatatcattcttgcacgcgtacatttttagcatccatcttggaatcctagatccttgttctattcccaatggtttcatcaatagaagattaaacatatcgtacgaacacgatggagagtaatcgtagcaaaagtaagcatttcctttaatcttagatcccggatactggatatattttgcagccaacacgtgcatccatgcagcatttcctacatatacccggctatgcaccgcgtcatcatcgactgtacgatacataatgttaccgtgttgcttacattgctcgtaaaagactttcatcaatttgtctccttctccgtaaattccagtgggtcttaggcaacaagtatacaattttgctccattcatgattacggaattattggctttcataaccagttgctcggccatacgtttactttttgcgtatacatgtcctggtgatatatcataaagggtatgctcatggccgatgaatggatcaccgtgtttattgggtcctattgcttccatgctactagtatagatcaaatacttgattcctaggtccacacaagctgccaaaatagtctgtgttccataatagtttactttcatgatttcattatcggtgtattttccaaatacatccactagagcagccgtatgaataatcagatttaccccatctagcgcttctctcaccttatcaaagtcgtttatatcacattgtatatagtttataaccttaactttcgaggttattggttgtggatcttctacaatatctatgactctgatttcttgaacatcatctgcactaattaacagttttactatatacctgcctagaaatccggcaccaccagtaaccgcgtacacggccattgctgccactcataatatcagactacttattctattttactaaataatggctgtttgtataatagaccacgataatatcagaggagttatttactttgaaccagtccatggaaaagataaagttttaggatcagttattggattaaaatccggaacgtatagtttgataattcatcgttacggagatattagtcaaggatgtgattccataggcagtccagaaatatttatcggtaacatctttgtaaacagatatggtgtagcatatgtttatttagatacagatgtaaatatatttacaattattggaaaggcgttatctatttcaaaaaatgatcagagattagcgtgtggagttattggtatttcttacataaatgaaaagataatacattttcttacaattaacgagaatggcgtttgatatatcagttaatgcgtctaaaacaataaatgcattagtttacttttctactcagcaaaataaattagtcatacgtaatgaagttaatgatacacactacactgtcgaatttgatagggacaaagtagttgacacgtttatttcatataatagacataatgacaccatagagataagaggggtgcttccagaggaaactaatattggttgcgcggttagtatgacttacttgtataataagtatagttttaaactgattttagcagaatatataagacacagaaatactatatccggcaatatttattcggcattgatgacactagatgatttggctattaaacagtatggagacattgatctattatttaatgagaaacttaaagtagactccgattcgggactatttgactttgtcaactttgtaaaggatatgatatgttgtgattctagaatagtagtagctctatctagtctagtatctaaacattgggaattgacaaataaaaaatataggtgtatggcattagccgaacatatatctgatagtattccaatatctgagctatctagactacgatacaatctatgtaagtatctacgcggacacactgagagcatagaggataaatttgattattttgaagacgatgattcgtctacatgttctgccgtaaccgacagggaaacggatgtataattttttttatagcgtgaaggatatgataaaaaatataattgttgtatttatcccattccaatcaccttatatgattctgtaacacaataaaggagtcttatagatgtatagaggtcagatactggtttgataaactgtttattccacataagtatgtttgactttatggttagacccgcatactttaacaaatcactgaaaattggagttaggtattgacctctcagaatcagttgccgttctggaacattaaatgtattttttatgatatactccaacgcatttatgtgggcatacaacaagtcattactaatggaatattccaagagttttagttgtctagtatttaacaagagaagagatttcaacagactgtttatgaactcgaatgccgcctcattgtcgcttatattgatgatgtcgaattctcccaatatcatcaccgatgagtagctcatcttgttatcgggatccaagttttctaaagatgtcattaaaccctcgatcatgaatggatttatcatcatcgtttttatgttggacatgagcttagtccgtttgtccacatctatagaagatgatttctgaattatttcatatatctctctctttaactccaggaacttgtcaggatggtctactttaatatgttctcgtctaagagatgaaaatctttggatggttgcacgcgacttttctctaaaggatgacgttgcccaagatcctctcttaaatgaatccatcttatccttggacaagatggacagtctattttccttagatggtttaatatttttgttacccatgatctataaaggtagacctaatcgtctcggatgaccatatatttattttcagttttattatacgcataaattgtaaaaaatatgttaggtttacgaaaatgtctcgtggggcattaatcgtttttgaaggattggacaaatctggaaaaacaacacaatgtatgaacatcatggaatcaataccttcaaacacaataaaataccttaactttcctcagagatccactgtcactggaaagatgatagatgactatctaactcgtaaaaaaacctataatgatcatatagttaatctattattttgtgcaaatagatgggagtttgcatcttttatacaagaacaactagaacagggaattactttaatagttgatagatacgcattttctggagtagcgtatgccgccgctaaaggcgcgtcaatgactctcagtaagagttatgaatctggattgcctaaacccgacttagttatattcttggaatctggtagcaaagaaattaatagaaacgtcggtgaggaaatttatgaagatgttacattccaacaaaaggtattacaagaatataaaaaaatgattgaagaaggagatattcattggcaaattatttcttctgaattcgaggaagatgtaaagaaggagttgattaagaatatagttatagaggctatacacacggttactggaccagtggggcaactgtggatgtaatagtgaaattacattttttataaatagatgttagtacagtgttataaatggatgaagcatattactctggcaacttggaatcagtactcggatacgtgtccgatatgcataccgaactcgcatcaatatctcaattagttattgccaagatagaaactatagataatgatatattaaacaaggacattgtaaattttatcatgtgtagatcaaacttggataatccatttatctctttcctagatactgtatatactattatagatcaagagaactatcagactgagttgattaattcattagacgacaatgaaattatcgattgtatagttaataagtttatgagcttttataaggataacctagaaaatatagtagatgctatcattactctaaaatatataatgaataatccagattttaaaactacgtatgccgaagtactcggttccagaatagccgatatagatattaaacaagtgatacgtaagaatatactacaattgtctaataatatccgcgaacgatatttgtgaaaatattaaaaaaaaatactttttttattaaatgacgtcttttcgtgaatttagaaaattatgctgtgctatatatcacgcatcaggatataaagaaaaatctaaattaattagagactttataacagatagggatgataaatatttgatcattaagctattgcttcccggattagacgatagaatttataacatgaacgataaacaaattataaaattatatagtataatatttaaacaatctcaggaagatatgctacaagatttaggatacggatatataggagacactattaggactttcttcaaagagaacacagaaatccgtccacgagataaaagcattttaactttagaagaagtggatagttttttaactacgttatcatccgtaactaaagaatcgcatcaaataaaattattgactgatgtagcatctgtttgtacatgtaatgatttaaaatgtgtagtcatgcttattgataaagatctaaaaattaaagcgggtcctcggtacgtacttaacgctattagtcctaatgcctatgatgtgtttagaaaatctaataacttgaaagagataatagaaaattcatctaaacaaaatctagactctatatctatttctgttatgactccaattaatcccatgttagcggaatcgtgtgattctgtcaataaggcgtttaaaaaatttccatcaggaatgtttgcggaagtcaaatacgatggtgaaagagtacaagttcataaaaataataacgagtttgccttctttagtagaaacatgaaaccagtactctctcataaagtggattatctcaaagaatacataccgaaagcatttaaaaaagctacgtctatcgtattggattctgaaattgttcttgtagacgaacataatgtaccgctcccgtttggaagtttaggtatacacaaaaagaaagaatataaaaactctaacatgtgtttgttcgtgtttgactgtttgtactttgatggattcgatatgacggacattccattgtacgaacgaagatcttttctcaaagatgttatggttgaaatacccaatagaatagtattctcagagttgacgaatattagtaacgagtctcagttaactgacgtattggatgatgcactaacgagaaaattagaaggattggtcttaaaagatattaatggagtatacgaaccgggaaagagaagatggttaaaaataaagcgagactatttgaacgagggttccatggcagattctgccgatttagtagtactaggtgcctactatggtaaaggagcaaagggtggtatcatggcagtctttctaatgggttgttacgacgatgaatccggtaaatggaagacggttaccaagtgttcaggacacgatgataatacgttaagggagttgcaagaccaattaaagatgattaaaattaacaaggatcccaaaaaaattccagagtggttagtagttaataaaatctatattcccgattttgtagtagaggatccgaaacaatctcagatatgggaaatttcaggagcagagtttacatcttccaagtcccataccgcaaatggaatatccattagatttcctagatttactaggataagagaggataaaacgtggaaagaatctactcatctaaacgatttagtaaacttgactaaatcttaatagttacatacaaactgaaaattaaaataacactatttagttggtggtcgccatggatggtgttattgtatactgtctaaacgcgctagtaaaacatggcgaggaaataaatcatataaaaaatgatttcatgattaaaccatgttgtgaaagagtttgtgaaaaagtcaagaacgttcacattggcggacaatctaaaaacaatacagtgattgcagatttgccatatatggataatgcggtatccgatgtatgcaattcactgtataaaaagaatgtatcaagaatatccagatttgctaatttgataaagatagatgacgatgacaagactcctactggtgtatataattattttaaacctaaagatgccattcctgttatcatatctataggaaaggataaagatgtctgtgaactattaatctcatcagacatatcgtgtgcatgcgtggagttaaattcatatcacgtagccattcttcccatggatgtttccttttttaccaaaggaaatgcatcattgattattctcctgtttgatttctctatcgatgcggcacctctcttaagaagtgtaaccgataataatgttattatatctagacaccagcgtctacatgacgagcttccgagttccaattggttcaagttttacataagtataaagtccgactattgttctatattatatatggttgttgatggatctgtgatgcatgcgatagctgataatagaactcacgcaattattagcaaaaatatattagacaatactacgattaacgatgagtgtagatgctgttattttgaaccacagattaggattcttgatagagatgagatgctcaatggatcatcgtgtgatatgaacagacattgtattatgatgaatttacctgatgtaggcgaatttggatctagtatgttggggaaatatgaacctgacatgattaagattgctctttcggtggctggtaatttaataagaaatcgagactacattcccgggagacgaggatatagctactacgtttacggtatagcctctagataatttttttaagcacgaaataaaaaacataattttaaaccaatctatttcatactattttgtgtgatcaccatggacataaagatagatattagtatttctggtgataaatttacggtgactactaggagggaaaatgaagaaagaaaaaaatatctacctctccaaaaagaaaaaactactgatgttatcaaacctgattatcttgagtacgatgacttgttagatagagatgagatgtttactattctagaggaatattttatgtacagaggtctattaggcctcagaataaaatatggacgactctttaacgaaattaaaaaattcgacaatgatgcggaagaacaattcggtactatagaagaactcaagcagaaacttagattaaattctgaagagggagcagataactttatagattatataaaggtacaaaaacaggatatcgtcaaacttactgtatacgattgcatatctatgataggattgtgtgcatgcgtggtagatgtttggagaaatgagaaactgttttctagatggaaatattgtttacgagcgattaaactgtttattgatgatcacatgcttgataagataaaatctatactgcagaatagactagtatatgtggaaatgtcatagaaagttaaaagttaatgagagcaaaaatatataaggttgtattccatatttgttatttttttctgtaatagttagaaaaatacattcgatggtctatctatcagattattatgtgttataaggtactttttctcataataaactagagtatgagtaagatagtgtttttcaaaacatataaatctaaaattgatggatgagatatacagctattaatttcgaaaatatattttaatctgataactttaaacatggatttttaatggtggtttaacgttttaaaaaaagattttgttattgtagtatatgataatattaaaagatggatataaagaatttgctgactgcatgtactattttttacattactacattggctacggcagatatacctacttcgtcactgccacacgctccggtaaacggggcatgtgacgagggagaatatcttgataagaggcataatcaatgttgtaatcagtgtccacctggagaatttgccaaggttagatgtaatggtaacgataacacaaaatgtgaacgctgcccacctcatacatataccgcaatccccaattactctaatggatgtcatcaatgtagaaaatgcccaacaggatcatttgataaggtaaagtgtaccggaacacagaacagtaaatgttcgtgtcttcctggttggtattgcgctactgattcttcacagactgaagattgtcgagattgtataccaaaaaggagatgtccatgcggatactttggtggaatagatgaacaaggaaatcctatttgtaaatcgtgttgtgttggtgaatattgcgactacctacgtaattatagacttgatccatttcctccatgcaaactatctaaatgtaattaattatgattttgatgataatgttaccatacattatatcgctacttggttagtgtattattcagtatgaagacctattaataattacttatcttttgacgatcttgttataattataatataaaaatacttatggcatagtaactcataattgctgacgcgataaattcgtaataatctgttttgttcaaatttttataaggaatctacaggcataaaaataaaaatataatttataatatactcttacagcgcgccatcatgaataacagcagtgaattgattgctgttattaatggatttagaaatagtggacgattttgtgatattaatatagttattaatgatgaaaggataaacgctcacagactcatcctatctggagcctccgaatatttttccattctgttttccaataattttatcgattctaatgaatacgaagttaatctaagtcatttagattatcaaagtgttaacgatttgatcgattacatttatgggatacctttgagcctaactaacgataacgtgaaatatattctttcaaccgctgattttttacaaattggatctgctattacggagtgtgaaaattacatacttaaaaatctttgttctagaaactgtatcgatttctacatatacgctgataaatataataacaagaaaatagaatcagcgtcgtttaacacaatattacaaaatattttgagactcatcaacgatgaaaactttaaatacttaacagaggaatcaatgataaaaattttaagcgatgatatgttaaatataaaaaatgaggatttcgccccactaattctcattaaatggttagagagtactcaacaaccatgcaccgtcgagttacttaaatgcctcagaatatcattgctttccccacaagttataaaatcactttatagtcatcgactggttagttcaatctacgaatgtataacattcttaaacaatatagcattcttggatgaatcatttcctagataccatagcatcgagttgatatctatcggtataagtaattcgcatgataagatttccataaactgctacaatcataaaaaaaatacatgggaaatgatatcttcacgtagatataggtgtagtttcgcagtggccgtcctggataatattatctatatgatgggtggatatgatcagtccccgtatagaagttcaaaggttatagcgtacaatacatgtacaaattcttggatatatgatataccagagctaaaatatcctcgttctaattgtgggggactggctgatgacgaatacatttattgtataggcggcatacgcgatcaggattcatcgttgacatctagtattgatagatggaagccatcaaaaccatattggcagaagtatgctaaaatgcgcgaaccaaaatgtgatatgggggttgcgatgttaaacggattaatatatgttataggtggaatcgttaaaggtgacacgtgtaccgacgcactagagagtttatcagaagatggatggatgaagcatcaacgtcttccaataaaaatgtccaatatgtcgacgattgttcatgatggcaagatttatatatctggaggttacaacaatagtagtgtagttaatgtaatatcgaatctagtccttagctataattcgatatatgatgaatggaccaaattatcatcattaaacattcctagaattaatcccgctctatggtcagcgcataataaattatatgtaggaggaggaatatctgatgatgttcgaactaatacatctgagacatacgacaaagaaaaagattgttggacattggataatggtcacgtgttaccacgcaattatataatgtataaatgcgaaccgattaaacataaatatccattggaaaaaacacagtacacgaatgattttctaaagtatttggaaagttttataggtagttgatagaacaaaatacataattttgtaaaaataaatcactttttatactaatatgacacgattaccaatacttttgttactaatatcattagtatacgctacaccttttcctcagacatctaaaaaaataggtgatgatgcaactctatcatgtaatcgaaataatacaaatgactacgttgttatgagtgcttggtataaggagcccaattccattattcttttagctgctaaaagcgacgtcttgtattttgataattataccaaggataaaatatcttacgactctccatacgatgatctagttacaactatcacaattaaatcattgactgctagagatgccggtacttatgtatgtgcattctttatgacatcaactacaaatgacactgataaagtagattatgaagaatactccacagagttgattgtaaatacagatagtgaatcgactatagacataatactatctggatctacacattcaccggaaactagttctgagaaacctgattatatagataattctaattgctcgtcggtattcgaaatctaagctcttttttttttttttttttttggcatataaataagtcgaccaccatggtgggtgaggatagcgtgctgatcaccgagaacatgcacatgaaactgtacatggagggcaccgtgaacgaccaccacttcaagtgcacatccgagggcgaaggcaagccctacgagggcacccagaccatgaagatcaaggtggtcgagggcggccctctccccttcgccttcgacatcctggctaccagcttcatgtacggcagcaaaacctttatcaaccacacccagggcatccccgacttctttaagcagtccttccctgagggcttcacatgggagaggatcaccacatacgaagacgggggcgtgctgaccgctacccaggacaccagcctccagaacggctgcctcatctacaacgtcaagatcaacggggtgaacttcccatccaacggccctgtgatgcagaagaaaacactcggctgggaggccagcaccgagatgctgtaccccgctgacagcggcctgagaggccatagccagatggccctgaagctcgtgggcgggggctacctgcactgctccctcaagaccacatacagatccaagaaacccgctaagaacctcaagatgcccggcttctacttcgtggacaggagactggaaagaatcaaggaggccgacaaagagacctacgtcgagcagcacgagatggctgtggccaggtactgcgacctgcctagcaaactggggcacagctgattaattaatttttatcgatctaattcaacaatgtctggagagcttcgcaggatcccgactccggaaccaattactgataaagaagatcatacagttacagacactgtctcatacactacagtaagtacatcatctggaattgtcactactaaatcaaccaccgatgatgcggatctttatgatacgtacaatgataatgatacagtaccaccaactactgtaggcggtagtacaacctctattagcaattataaaaccaaggactttgtagaaatatttggtattaccgcattaattatattgtcggccgtggcaattttctgtattacatattatatatataataaacgttcacgtaaatacaaaacagagaacaaagtctagatttttgacttacataaatgtctgggatagtaaaatctatcatattgagcggaccatctggtttaggaaagacagccatagccaaaagactatgggaatatatttggatttgtggtgtcccataccactagatttcctcgtcctatggaacgagaaggtgttgattaccattacgttaacagagaggccatctggaagggaatagccgccggaaactttctagaacatactgagtttttaggaaatatttacggaacttctaaaacagctgtgaatacagcggctattaataatcgtatttgtgtgatggatctaaacatcgacggtgttagaagtcttaaaaatacgtacctaatgccttactcggtgtatataagacctacctctcttaaaatggttgagaccaagcttcgtcgtagaaacactgaagctaacgatgagattcatcgtcgtgtgatgttggcaaaaactgacatggatgaggcaggtgaagccggtctattcgacactattatcattgaagatgatgtgaatttagcatatagtaagttaattcagatactacaggaccgtattagaatgtattttaacactaattagagacttaagacttaaaacttgataattaataatataactcgtttttatatgtgtctatttcaacgtctaatgtattagttaaatattaaaacttaccacgtaaaacttaaaatttaaaatgatatttcattgacagatagatcacacattatgaactttcaaggacttgtgttaactgacaattgcaaaaatcaatgggtcgttggaccattaataggaaaaggtggattcggtagtatttatactactaatgacaataattatgtagtaaaaatagagcccaaagctaacggatcattatttaccgaacaggcattttatactagagtacttaaaccatccgttatcgaagaatggaaaaaatctcacaatataaagcacgtaggtcttatcacgtgcaaggcatttggtctatacaaatccattaatgtggaatatcgattcttggtaattaatagattaggtgcagatctagatgcggtgatcagagccaataataatagactaccaaaaaggtcggtgatgttgatcggaatcgaaatcttaaataccatacaatttatgcacgagcaaggatattctcacggagatattaaagcgagtaatatagtcttagatcaaatagataagaataaattatatctagtggattacggattggtttctaaattcatgtctaatggcgaacatgttccatttataagaaatccaaataaaatggataacggtactctagaatttacacctatagattcgcataaaggatacgttgtatctagacgtggagatctagaaacacttggatattgtatgattagatggttgggaggtatcttaccatggactaagatatctgaaacaaagaattgtgcattagtaagtgccacaaaacagaaatatgttaacaatactgcgactttgttaatgaccagtttgcaatatgcacctagagaattgctgcaatatattaccatggtaaactctttgacatattttgaggaacccaattacgacaagtttcggcacatattaatgcagggtgtatattattaagtgtggtgtttggtcgataaaaattaaaaaataacttaatttattattgatctcgtgtgtacaaccgaaatcatggcgatgttttacgcacacgctctcggtgggtacgacgagaatcttcatgcctttcctggaatatcatcgactgttgccaatgatgtcaggaaatattctgttgtgtcagtttataataacaagtatgacattgtaaaagacaaatatatgtggtgttacagtcaggtgaacaagagatatattggagcactgctgcctatgtttgagtgcaatgaatatctacaaattggaaatccgatccatgatcaagaaggaaatcaaatctctatcatcacatatcgccacaaaaactactatgctctaagcggaatcgggtacgagagtctagacttgtgtttggaaggagtagggattcatcatcacgtacttgaaacaggaaacgctgtatatggaaaagttcaacatgattattctactatcaaagagaaggccaaagaaatgagtgcacttagtccaggacctatcatcgattaccacgtctggataggagattgtatctgtcaagttactgctgtggacgtacatggaaaggaaattatgaaaatgagattcaaaaagggtgcggtgcttccgatcccaaatctggtaaaagttaaacttggggagaatgatacagaaaatctttcttctactatatcggcggcaccatcgaggtaaccacctctctggaagacagcgtgaatcatgtactcatgaaacgtttggaaactatacgccatatgtggtctgttgtatatgatcattttgatattgtgaatggtaaagaatgctgttatgtgcatacgcattcatctaatcaaaatcctataccgagtactgtaaaaacaaatttgtacatgaagactatgggatcatgcattcaaatggattccatggaagctctagagtatcttagcgaactgaaggaatcaggtggatggagtcccagaccagaaatgcaggaatttgaatatccagatggagtggaagacactgaatcaattgagagattggcagaggagttcttcaatagatcagaacttcaggctggtgaatcagtcaaatttggtaattctattaattgttaaacatacatctgtttcagctaagcaactaagaacacgtatacggcagcagcttccttctatactctcatcttttaccaacacaaagggtggatatttgttcattggagttgataataatacacacaaagtatttggattcacggtgggttacgactacctcagactgatagagaatgatatagaaaagcatatcaaaagacttcgtgttgtgcatttctgtgagaagaaagaggacatcaagtacgcgtgtcgattcatcaaggtatataaacctggggatgagactacctcgacatacgtgtgcgctatcaaagtggaaagatgctgttgtgctgtgtttgcagattggccagaatcatggtatatggatactaatggtatcaagaagtattctccagatgaatgggtgtcacatataaaattttaattaatgtaactatagagaacaaataataaggttgtaatatcatatagacaataactaacaattaattagtaactgttatctcttttttaactaaccaactaactatatacctattaatacatcgtaattatagttcttaacatctattaatcattaattcgcttctttaattttttataaactaacattgttaattgaaaagggataacatgttacagaatataaattatatatggatttttttaaaaaggaaatacttgactggagtatatatttatctcttcattatatagcacgcgtgttttccaatttttccacatcccatataatacaggattataatctcgttcgaacatacgagaaagtggataaaacaatagttgattttttatctaggttgccaaatttattccatattttagaatatggggaaaatattctacatatttattctatggatgatgctaatacgaatattataattttttttctagatagagtattaaatattaataagaacgggtcatttatacacaatctcgggttatcatcatccattaatataaaagaatatgtatatcaattagttaataatgatcatccagataataggataagactaatgcttgaaaatggacgtagaacaagacattttttgtcctatatatcagatacagttaatatctatatatgtattttaataaatcatggattttatatagatgccgaagacagttacggttgtacattattacatagatgtatatatcactataagaaatcagaatcagaatcatacaatgaattaattaagatattgttaaataatggatcagatgtagataaaaaagatacgtacggaaacacaccttttatcctattatgtaaacacgatatcaacaacgtggaattgtttgagatatgtttagagaatgctaatatagactctgtagactttaatagatatacacctcttcattatgtctcatgtcgtaataaatatgattttgtaaagttattaatttctaaaggagcaaatgttaatgcgcgtaataaattcggaactactccattttattgtggaattatacacggtatctcgcttataaaactatatttggaatcagacacagagttagaaatagataatgaacatatagttcgtcatttaataatttttgatgctgttgaatctttagattatctattatccagaggagttattgatattaactatcgtactatatacaacgaaacatctatttacgacgctgtcagttataatgcgtataatacgttggtctatctattaaacaaaaatggtgattttgagacgattactactagtggatgtacatgtatttcggaagcagtcgcaaacaacaacaaaataataatggaagtactattgtctaaacgaccatctttgaaaattatgatacagtctatgatagcaattactaaacataaacagcataatgcagatttattgaaaatgtgtataaaatatactgcgtgtatgaccgattatgatactcttatagatgtacagtcgctacagcaatataaatggtatattttaagatgtttcgatgaaatagatatcatgaagagatgttatataaaaaataaaactgtattccaattagttttttgtatcaaagacattaatactttaatgagatacggtaaacatccttctttcgtgaaatgcactagtctcgacgtatacggaagtcgtgtacgtaatatcatagcatctattagatatcgtcagagattaattagtctattatccaagaagctggatcctggagataaatggtcgtgttttcctaacgaaataaaatataaaatattggaaaactttaacgataacgaactatccacatatctaaaaatcttataaacattattaaaatataaaatctaagtaggataaaatcacactacatcattgtttccttttagtgctcgacagtgtatactatttttaacgctcataaataaaaatgaaaacgatttccgttgttacgttgttatgcgtactacctgctgttgtttattcaacatgtactgtacccactatgaataacgctaaattaacgtctaccgaaacatcgtttaatgataaccagaaagttacgtttacatgtgatcagggatatcattctttggatccaaatgctgtctgtgaaacagataaatggaaatacgaaaatccatgcaaaaaaatgtgcacagtttctgattatgtctctgaactatataataaaccgctatacgaagtgaattccaccatgacactaagttgcaacggcgaaacaaaatattttcgttgcgaagaaaaaaatggaaatacttcttggaatgatactgttacgtgtcctaatgcggaatgtcaacctcttcaattagaacacggatcgtgtcaaccagttaaagaaaaatactcatttggggaatatatgactatcaactgtgatgttggatatgaggttattggtgcttcgtacataagttgtacagctaattcttggaatgttattccatcatgtcaacaaaaatgtgatatgccgtctctatctaacggattaatttccggatctacattttctatcggtggcgttatacatcttagttgtaaaagtggttttacactaacggggtctccatcatccacatgtatcgacggtaaatggaatcccatactcccaatatgtgtacgaactaacgaaaaatttgatccagtggatgatggtcccgacgatgagacagatttgagcaaactctcgaaagacgttgtacaatatgaacaagaaatagaatcgttagaagcaacttatcatataatcatagtggcgttgacaattatgggcgtcatatttttaatctccgttatagtattagtttgttcctgtgacaaaaataatgaccaatataagttccataaattgctaccgtaaatataaatccgttaaaataattaataatttaataacaaacaagtatcaaaagattaaagacttatagctagaatcaattgagatgtcttcttcagtggatgttgatatctacgatgccgttagagcatttttactcaggcactattataacaagagatttattgtgtatggaagaagtaacgccatattacataatatatacaggctatttacaagatgcgccgttataccgttcgatgatatagtacgtactatgccaaatgaatcacgtgttaaacaatgggtgatggatacacttaatggtataatgatgaatgaacgcgatgtttctgtaagcgttggcaccggaatactattcatggaaatgtttttcgattacaataaaaatagtatcaacaatcaactaatgtatgatataattaatagcgtatctataattctagctaatgagagatatagaagcgcttttaacgacgatggtatatacatccgtagaaatatgattaacaagttgtacggatacgcatctctaactactattggcacgatcgctggaggtgtttgttattatctgttgatgcatctagttagtttgtataaataattatttcaatatactagttaaaattttaagattttaaatgtataaaaaactaataacgtttttatttgtaataggtgcattagcatcctattcgaataatgagtacactccgtttaataaactgagtgtaaaactctatatagatggagtagataatatagaaaattcatatactgatgataataatgaattggtgttaaattttaaagagtacacaatttctattattacagagtcatgcgacgtcggatttgattccatagatatagatgttataaacgactataaaattattgatatgtataccattgactcgtctactattcaacgcagaggtcacacgtgtagaatatctaccaaattatcatgccattatgataagtacccttatattcacaaatatgatggtgatgagcgacaatattctattactgcagagggaaaatgctataaaggaataaaatatgaaataagtatgatcaacgatgatactctattgagaaaacatactcttaaaattggatctacttatatatttgatcgtcatggacatagtaatacatattattcaaaatatgatttttaaaaatttaaaatatattatcacttcagtgacagtagtcaaataacaaacaacaccatgagatatattataattctcgcagttttgttcattaatagtatacatgctaaaataactagttataagtttgaatccgtcaattttgattccaaaattgaatggactggggatggtctatacaatatatcccttaaaaattatggcatcaagacgtggcaaacaatgtatacaaatgtaccagaaggaacatacgacatatccgcatttccaaagaatgatttcgtatctttctgggttaaatttgaacaaggcgattataaagtggaagagtattgtacgggactatgcgtcgaagtaaaaattggaccaccgactgtaacattgactgaatacgacgaccatatcaatttgtacatcgagcatccgtatgctactagaggtagcaaaaagattcctatttacaaacgcggtgacatgtgtgatatctacttgttgtatacggctaacttcacattcggagattctaaagaaccagtaccatatgatatcgatgactacgattgcacgtctacaggttgcagcatagactttgtcacaacagaaaaagtgtgcgtgacagcacagggagccacagaagggtttctcgaaaaaattactccatggagttcgaaagtatgtctgacacctaaaaagagtgtatatacatgcgcaattagatccaaagaagatgttcccaatttcaaggacaaaatggccagagttatcaagagaaaatttaatacacagtctcaatcttatttaactaaatttctcggtagcacatcaaatgatgttaccacttttcttagcatgcttaacttgactaaatattcataactaatttttattaatgatacaaaaacgaaataaaactgcatattatacactggttaacgcccttataggctctaaccattttcaagatgaggtccctgattatagtccttctgttcccctctatcatctactccatgtctattagacgatgtgagaagactgaagaggaaacatggggattgaaaatagggttgtgtataattgccaaagatttctatcccgaaagaactgattgcagtgttcatctcccaactgcaagtgaaggattgataactgaaggcaatggattcagggatatacgaaacaccgataaattataaaaaaagcaatgtgtccgctgtttccgttaataatactattttcgtaactggcggattattcataaataactctaatagcacgatcgtggttaacaatatggaaaaacttgacatttataaagacaaacaatggtcgattatagaaatgcctatggctagggtatatcacggcattgactcgacatttggaatgttatattttgccggaggtctatccgttaccgaacaatatggtaatttagagaaaaacaacgagatatcttgttacaatcctagaacgaataagtggtttgatatttcatatactatttataagatatccatatcatcattgtgtaaactaaataacgtcttctatgtatttagtaaggacattggatatgtggaaaagtatgatggtgcatggaagttagtacatgatcgtctccccgctataaaggcattatcaacttctccttattgattgaaaatgaaaatataaatagtttttatgtatagcagtattaccctatagttttattgcttactactaacatggatacagatgttacaaatgtagaagatatcataaatgaaatagatagagagaaagaagaaatactaaaaaatgtagaaattgaaaataataaaaacattaacaagaatcatcccaatgaatatattagagaagcactcgttattaataccagtagtaatagtgattccattgataaagaagttatagaatgtatcagtcacgatgtaggaatatagatcatatctactaatttttataatcgatacaaaacataaaaaacaactcgttattacatagcaggcatggaatccttcaagtattgttttgataacgatggcaagaaatggattatcggaaatactttatattctggtaattcaatactctataaggtcagaaaaaatttcactagttcgttctacaattacgtaatgaagatagatcacaaatcacacaagccattgttgtctgaaatacgattctatatatctgtattggatcctttgactatcgacaactggacacgggaacgtggtataaagtatttggctattccagatctgtatggaattggagaaaccgatgattatatgttcttcgttataaagaattcgggaagagtattcgccccaaaggatactgaatcagtcttcgaagcatgcgtcactatgataaacacgttagagtttatacactctcgaggatttacccatggaaaaatagaaccgaggaatatactgattagaaataaacgtctttcactaattgactattctagaactaacaaactatacaagagtggaaactcacatatagattacaacgaggacatgataacttcaggaaatatcaattatatgtgtgtagacaatcatcttggagcaacagtttcaagacgaggagatttagaaatgttgggatattgcatgatagaatggttcggtggcaaacttccatggaaaaacgaaagtagtataaaagtaataaaacaaaaaaaagaatataaaaaatttatagctactttctttgaggactgttttcctgaaggaaatgaacctctggaattagttagatatatagaattagtatacacgttagattattctcaaactcctaattatgacagactacgtaaactgtttatacaagattgaaattatattcttttttttatagagtgtggtagtgttacggatatctaatattaatattagactatctctatcgcgctacacgaccaatatcgattactatggatatcttctatgaaaggagagaatgtatttatttctccagcgtcaatctcgtcagtattgacaatactgtattatggagctaatggatccactgctgaacagctatcaaaatatgtagaaacggaggagaacacggataaggttagcgctcagaatatctcattcaaatccatgaataaagtatatgggcgatattctgccgtgtttaaagattcctttttgagaaaaattggcgataagtttcaaactgttgacttcactgattgtcgcactatagatgcaatcaacaagtgtgtagatatctttactgaggggaaaatcaatccactattggatgaaccattgtctcctagcaattagtgccgtatactttaaagcaaaatggttgacgccattcgaaaaggaatttaccagtgattatcccttttacgtatctccgacggaaatggtagacgtaagtatgatgtctatgtacggcaaggcatttaatcacgcatctgtaaaagaatcattcggcaacttttcaatcatagaactgccatatgttggagatactagtatgatggtcattcttccagacaagattgatggattagaatccatagaacaaaatctaacagatacaaattttaagaaatggtgtgactttatggatgctatgtttatagatgttcacattcccaagtttaaggtaacaggctcgtataatctggtggatactctagtaaagtcaggactgacagaggtgttcggttcaactggagattatagcaatatgtgtaatttagatgtgagtgtcgacgctatgatccacaaaacgtatatagatgtcaatgaagagtatacagaagcagctgcagcaacttctgtactagtggcagactgtgcatcaacaattacaaatgagttctgtgcagatcatccgttcatctatgtgattaggcatgttgatggaaaaattcttttcgttggtagatattgctctccgacaactaattgttaaccattttttttaaaaaaaatagaaaaaacatgtggtattagtgcaggtcgttgttcttccaattgcaattggtaagatgacggccaactttagtacccacgtcttttcaccacagcactgtggatgtgacagactgaccagtattgatgacgtcaaacaatgtttgactgaatatatttattggtcgtcctatgcataccgcaacaggcaatgcgctggacaattgtattccacactcctctcttttagagatgatgcggaattagtgttcatcgacattcgcgagctggtaaaaaatatgccgtgggatgatgtcaaagattgtacagaaatcatccgttgttatataccggatgagcaaaaaaccatcagagagatttcggccatcatcggactttgtgcatatgctgctacttactggggaggtgaagaccatcccactagtaacagtctgaacgcattgtttgtgatgcttgagatgctaaattacgtggattataacatcatattccggcgtatgaattgatgagttgtacatcttgacattttctttcttctcttctccctttcttctcttctcccttcctccctcttctccctttcccagaaacaaacttttttacccactataaaataaaatgagtatactacctattatatttcttcctatatttttttattcttcattcgttcagacttttaacgcgtctgaatgtatcgacaaagggcaatattttgcatcattcatggagttagaaaacgagccagtaatcttaccatgtcctcaaataaatacgctatcatccggatataatatattagatattttatgggaaaaacgaggagcggataatgatagaattataccgatagataatggtagcaatatgctaattctgaacccgacacaatcagactctggtatttatatatgcattaccacgaacgaaacctactgtgacatgatgtcgttaaatttgacaatcgtgtctgtctcagaatcaaatatagatcttatctcgtatccacaaatagtaaatgagagatctactggcgaaatggtatgtcccaatattaatgcatttattgctagtaacgtaaacgcagatattatatggagcggacatcgacgccttagaaataagagacttaaacaacggacacctggaattattaccatagaagatgttagaaaaaatgatgctggttattatacatgtgttttagaatatatatacggtggcaaaacatataacgtaaccagaattgtaaaattagaggtacgggatagaataataccttctactatgcaattaccagatggcattgtaacttcaataggtagtaatttgactattgcatgcagagtatcgttgagacctcccacaacggacaccgacgtcttttggataagtaatggtatgtattacgaagaagatgatggggacggaaacggtagaataagtgtagcaaataaaatctatatgaccgataagagacgtgttattacatcccggttaaacattaatcctgtcaaggaagaagatgctacaacgtttacgtgtatggcgtttactattcctagcatcagcaaaacagttactgttagtataacgtgaatgtatgttgttacatttccatgtcaattgagtttataagaatttttatacattatcttccaacaaacaattgacgaacgtattgctatgattaactcccacgatactatgcatattattaatcattaacttgcagactatacctagtgctattttgacatactcgtgttcttgtgtaattgcggtatctatattattaaagtacgtaaatctagctatagttttattatttaattttagataatataccgtctccttatttttaaaaattgccacatcctttattaaatcatgaatgggaatttctatgtcatcgttagtatattgtgaacaacaagagcagatatctataggaaagggtggaatgcgatacattgatctatgtagttttaaaacacacgcgaactttgaagaatttatataaatcattccatcgatacatccttctatgttgacatgtatatatccaggaattcttttattaatgtcaggaaatgtataaactaaaacattgcccgaaagcggtgcctctatctgcgttatatccgttcttaacttacaaaatgtaaccaatacctttgcatgacttgttttgttcggcaacgttagtttaaacttgacgaatggattaattacaatagcatgatccgcgcatctattaagtttttttactttaacgcccttgtatgtttttacagagactttatctaaatttctagtgcttgtatgtgttataaatataacgggatatagaaccgaatcacctaccttagatacccaattacattttatcagatccagataataaacaaattttgtcgccctaactaattctatattgttatatattttacaattggttatgatatcatgtaataacttggagtctaacgcgcatcgtcgtacgtttatacaattgtgatttagtgtagtatatctacacatgtatttttccgcactatagtattctggactagtgataaaactatcgttatatctgtcttcaatgaactcatcgagatattgctctctgtcatattcatacacctgcataaactttctagacatcttacaatccgtgttattttaggatcatatttacatatttacgggtatatcaaagatgttagattagttaatgggaatcgtctataataatgaatattaaacaattatatgaggacttttaccacaaagcatcataaaaatgagtcgtcgtctgatttatgttttaaatatcaaccgcaaatcaactcataaaatacaagagaatgaaatatatacatattttagtcattgcaatatagaccatacttctacagaacttgattttgtagttaaaaactatgatctaaacagacgacaacctgtaactgggtatactgcactacactgctatttgtataataattactttacaaacgatgtactgaagatattattaaatcatgacgtaaatgtaacgatgaaaaccagtagcggacgtatgcctgtttatatattgcttactagatgttgtaatatttcacatgatgtagtgatagatatgatagacaaagataaaaaccacttattacatagagactattccaacctattactagagtatataaaatctcgttacatgttattgaaggaagaggatatcgatgagaacatagtatccactttattagataagggaatcgatcctaactttaaacaagacggatatacagcgttacattattattatttgtgtctcgcacacgtttataaactaggtgagtgtagaaaaccgataacgataaaaaaggccaagcgaattatttctttgtttatacaacatggagctaatctaaacgcgttagataattgtggtaatacaccattccatttgtatcttagtattgaaatgtgtaataatattcatatgactaaaatgctgttgacttttaatccgaatttcaaaatatgtaataatcatggattaacgcctatactatgttatataacttccgactacatacaacacgatattcttgttatgttaatacatcactatgaaacaaatgttggagaaatgccgatagatgagcgtcgtatgatcgtattcgagtttatcaaaacatattctacacgtccggcagattcgataacttatttgatgaataggtttaaaaatataaatatttatacccgctatgaaggaaagacattattacacgtagcatgtgaatataataatacacaagtaatagattatcttatacgtatcaacggagatataaatgcgttaaccgacaataacaaacacgctacacaactcattatagataacaaagaaaattccccatataccattaattgtttactgtatatacttagatatattgtagataagaatgtgataagatcgttggtggatcaacttccatctctacctatcttcgatataaaatcatttgagaaattcatatcctactgtatacttttagatgacacattttacgataggcacgttaagaatcgcgattctaaaacgtatcgatacgcattttcaaaatacatgtcgtttgataaatacgatggtataataactaaatgtcacgacgaaacaatgttactcaaactgtccactgttctagacactacactatatgcagttttaagatgtcataattcgagaaagttaagaagatacctcaacgagttaaaaaaatataataacgataagtcctttaaaatatattctaatattatgaatgagagataccttaatgtatattataaagatatgtacgtgtcaaaggtatatgataaactatttcctgttttcacagataaaaattgtctactaacattactaccttcagaaattatatacgaaatattatacatgctgacaattaacgatctttataatatatcgtatccacctaccaaagtatagttgtatttttctcatgcgatgtgtgtaaaaaaactgatattatataaatattttagtgccgtataataaagatgacgatgaaaatgatggtacatatatatttcgtatcattattgttattgctattccacagttacgccatagacatcgaaaatgaaatcacagaattcttcaataaaatgagagatactctaccagctaaagactctaaatggttgaatccagcatgtatgttcggaggcacaatgaatgatatagccgctctaggagagccattcagcgcaaagtgtcctcctattgaagacagtcttttatcgcacagatataaagactatgtggttaaatgggagaggctagaaaagaatagacggcgacaggtttctaataaacgtgttaaacatggtgatttatggatagccaactatacatctaaattcagtaaccgtaggtatttgtgcaccgtaactacaaagaatggtgactgtgttcagggtatagttagatctcatattaaaaaacctccttcatgcattccaaaaacatatgaactaggtactcatgataagtatggcatagacttatactgtggaattctttacgcaaaacattataataatataacttggtataaagataataaggaaattaatatcgacgacattaagtattcacaaacgggaaaggaattaattattcataatccagagttagaagatagcggaagatacgactgttacgttcattacgacgacgttagaatcaagaatgatatcgtagtatcaagatgtaaaatacttacggttataccgtcacaagaccacaggtttaaactaatactagatccgaaaatcaacgtaacgataggagaacctgccaatataacatgcactgctgtgtcaacgtcattattgatcgacgatgtactgattgaatgggaaaatccatccggatggcttataggattcgattttgatgtatactctgttttaactagtagaggcggtatcaccgaggcgaccttgtactttgaaaatgttactgaagaatatataggtaatacatataaatgtcgtggacacaactattattttgaaaaaacccttacaactacagtagtattggagtaaatatacaatgcatttttatatacattactgaattattattactgaattattattactgaattattattaattatatcgtatttgtgctatagaatggatgaagatacgcgactatctaggtatttgtatctcaccgatagagaacatataaatgtagactctattaaacagttgtgtaaaatatcagatcctaatgcatgttatagatgtggatgtacggctttacatgagtacttttataattatagatcagtcaacggaaaatacaagtatagatacaacggttactatcaatattattcatctagcgattatgaaaattataatgaatattattatgatagaactggtatgaacagtgagagtgataatatatcaatcaaaacagaatatgaattctatgatgaaacacaagatcaaagtacacaactagtaggttacgacattaaactcaaaaccaatgaggatgattttatggctatgatagatcagtgggtgtccatgattatatagatgaatcaattaataaagtagtatatggaagagagtctcacgtaagatggcgggatatatggcaagaacataatgatggcgtatacagtataggaaaggagtgcatagataatatatacgaagacaaccataccgtagacgaattctacaagatagacagcgtatcagatgtagatgacgcggaacacatatctccgataactaaaaaaccatagaatcagttgatgataatacctacatttctaatcttccgtataccatcaaatacaaaatattcgagcaacaataagtattttttatacctttaaaactgataaataaattttttctagtgatattttggcaagatgagaatcctatttctcatcgctttcatgtatgggtgtgttcactcatatgttaacgcggttgaaaccaaatgtccaaatctagacattgtaacatcttctggagaatttcattgttcaggatgtgtggaacatatgcctgagtttagctatatgtattggttggcaaaggatatgaaatcggacgaggataccaagtttatagaacatctgggtgatggcatcaaagaagatgaaaccgttcgtaccacagatagtggaatcgtcactctacgtaaagtccttcatgtgactgatactaataaatttgataattataggttcacttgtgtcctcgctacgctagatggcatttataaaaagaatgtttgctgaagtagttgtgtgctactatttttatttatgatataatctaatggaattaatttgaattgatatttatccaatactaaagattatattagaatcaaattaatcttttatacgagaaaaaataacgacatacgtcgtcaacaaattaaactttttatttattagttaactagcttatagaacttgctcattgttatgtttctaaaacgggtacggcatataggacaattatccgacgcaccggtttctcttcgtgttctatgccatatattgatgcatgttatgcaaaatatatgagtacacgaatccaataaaccaaagtatctatcgttttgagtaaacaacttcatagcaaattccacattctttttctttacttactctatacacgtcctcgtatttatttagtattttgatgatatccaactcagaaatggttgttgtattattgggtgtatttggagtataggtattattagctatgtaccaatttaccaaccctcttaatattgattgataatcacatcggttatccaattaataactaaattgtagtgtatatatagaccatatatgtttctatttttttgacagttacgtatagtttcagtaagttttgattgttgtattcctgtatctctagataagttagtcatatagtcccttccggcgatacgttttttccaagcccgaaattgattagccaaatgtgtatttatttttgtgatattgatataatatttcggataatgcatactgttagtcttatatcatttggttcatctatgtattgtaatattgttacatgatctatagatgatgtattgattttggcaggatcgaattccatatccgcgactaaacagtgaaaaaaatgtaaatactttttaaattttaaattagtaaaacttttttttattttttatgattccaaaaatactgaatacaaagtcctaaattataaatatggagatcatactaccacaacttattattatgtatacaaggccggtgtaatagatagatatatataattctattacaccggcagacaattaccgaccggtatttgtcgttaccaacataccgtataatatgtaatatacaattccataacccattgacagttgttatacatcaaaattgcaattcttttgattacgatgttataagaatgtagttaattgatgtatgatgttaatgtgtcctctttcctcttataacatcgtaatcaaaaacttttttataatatatacctaataatgtgtcttaatagttctcgtgattcgtcaaacaatcattcttataaaatataataaagcaacgtaaaaacacataaaaataagcgtaactaataagacaatggatatttacgacgataaaggtctacagactattaaactgtttaataatgaatttgattgtataaggaatgacatcagagaattatttaaacatgtaactgattccgatagtatacaacttccgatggaagacaattctgatattatagaaaatatcagaaaaatactatatagacgattaaaaaatgtagaatgtgttgacatcgataacacaataacttttatgaaatacgatccaaatgatgataataagcgtacgtgttctaattgggtacccttaactaataactatatggaatattgtctagtaatatatttggaaacaccgatatgtggaggcaaaataaaattataccaccctacaggaaatataaagtcggataaggatattatgtttgcaaagactctagactttaaatcaacgaaagtgttaactggacgtaaaacaattgccgttctagacatatccgtttcatataatagatcaatgactactattcactacaacgacgacgttgatatagatatacatactgataaaaatggaaaagagttatgttattgttatataacaatagatgatcattacttggttgatgtggaaactataggagttatagtcaatagatctggaaaatgtctgttagtaaataaccatctaggtataggtatcgttaaagataaacgtataagcgatagttttggagatgtatgtatggatacaatatttgacttttctgaagcacgagagttattttcattaactaatgatgataacaggaatatagcatgggacactgataaactagacgatgatacagatatatggactcccgtcacagaagatgattacaaatttctttctagactagtattgtatgcaaaatctcaatcggatactgtatttgactattatgttcttactggtgatacggaaccacccactgtattcattttcaaggtaactagattttactttaatatgccgaaataaaaaatttttgtataatatctagaggtagaggtattgtttagataaatacaaataacatagatacatcgcatacttagcatttttataaatatacataagacatacactttatacatttttgtaaaaatactcataaaaaaatttataaaaattatggcacaaccatatcttgtataggtagtttagttcgtcgagtgaacctataaacagataatagacaacacataataatgcctactaatacaagcataataccgggagatgggatatatgacgttgtagtgtttgggttttctgaacgttgatagtctactaatactacatgctgacatctaatgcctgtataaccatgagagcatctacaatacataccgtcaatatctctagcgtggatacagtcaccgtgtaaacaatatccatctccctctggaccgcataatctgatagctggaatatctgttgtagcgtttgtaatttctggcaatgtcgtttcgatagcgttaccactatcggcgaatgatctgattatcatagcagcgaacaacaacatcagataatttatcaacatttttgatggattctgtgtttatgctgtttctcagtgtgtgtttatgacaagattgggaattttatattattaattcagtaatataaactaataatatattgttaattgtgtaaataatataaaaataacaatacaatattgaatgtgttgctgttaaaaatgtatgtgttaatataatagaataaaataaatgagtatgatcattttagataacgattgattttatcattaccgcttcattcttatattctttgcttacggaacctatatttagaaacatctactaacaattttttatgcttgcattattaatggtatgtaatatgattgattgtgtacgcaataccaatttgttaagtatgaatacggggtacaaacataaattgaaatttaacattatttatttatgatatatatcgttatcgttaggtctataccatggatatctttaaagaactaatcttaaaacaccctgatgaaaatgttttgatttctccagtttccattttatctactttatctattctaaatcatggagcagctggttctacagctgaacaactatcaaaatatatagagaatatgaatgagaatacacccgatgacaataatgatgacatggaggtagatattccgtattgtgcgacactagctaccgcaaataaaatatacggtagcgatagtatcgagttccacgcctccttcctacaaaaaataaaagacgattttcaaactgtaaactttaataatgctaaccaaacaaaggaactaatcaacgaatgggttaagacaatgacaaatggtaaaattaattccttattgactagtccgctatccattaatactcgtatgacagttgttagcgccgtccattttaaagcaatgtggaaatatccattttctaaacatcttacatatacagacaagttttatatttctaagaatatagttaccagcgttgatatgatggtgggtaccgagaataacttgcaatatgtacatattaatgaattattcggaggattctctattatcgatattccatacgagggaaactctagtatggtaattatactaccggacgacatagaaggtatatataacatagaaaaaaatataacagatgaaaaatttaaaaaatggtgtggtatgttatctactaaaagtatagacttgtatatgccaaagtttaaagtggaaatgacagaaccgtataatctggtaccgattttagaaaatttaggacttactaatatattcggatattatgcagattttagcaagatgtgtaatgaaactatcactgtagaaaaatttctacatacgacgtttatagatgttaatgaggagtatacagaagcatcggccgttacaggagtatttacgattaacttttcgatggtatatcgtacgaaggtctacataaaccatccattcatgtacatgattaaagacaccacaggacgtatactttttatagggaaatactgctatccgcaataaatataaacaaatagacttttataaagagtcttcaacgataagtatatcgacatactacttatgctgcgaaagattctgaacgagaacgactatctcaccctcttggatcatatccgcactgctaaatactaaatctccactacactttttatcatcttatgaggaatgattgccttcgtgaaataggaataattagcaccagaatagctatggattattgtggtagagagtgcactattctatgtcgtctactggatgaagatgtgacgtacaaaaaaataaaactagaaattgaaacgtgtcacaacttatcaaaacatatagatagacgaggaaacaatgcgctacattgttacgtctccaataaatgcgatacagacattaagattgttctctcgcggagtcgagagactttgtagaaacaacgaaggattaactccgctaggagtatacagtaagcatagatacgtaaaatctcagattgtgcatctactgatatccagctattcaaattcctctaacgaactcaagtcgaatataaatgatttcgatctgtattcggataatatcgacttacgtctgctaaaatacctaattgtggataaacggatacgtccgtccaagaatacgaattatgcaatcaatggtctcggattggtggatatatacgtaacgacgcctaatccgagaccagaagtattgctatggcttcttaaatcagaatgttacagcaccggttacgtatttcgtacctgtatgtacgacagtgatatgtgtaagaactctcttcattactatatatcgtctcatagagaatctcaatctctatccaaggatgtaattaaatgtttgatcgataacaatgtttccatccatggcagagacgaaggaggatctttacccatccaatactactggtctttctcaaccatagatatagagattgttaaattattattaataaaggatgtggacacgtgtagagtatacgacgtcagccctatattagaggcgtattatctaaacaagcgatttagagtaaccccatataatgtagacatggaaatcgttaatcttcttattgagagacgtcatactcttgtcgacgtaatgcgtagtattacttcgtacgattccagagaatataaccactacatcatcgataacattctaaagagatttagacaacaggatgaatccatcgtacaagccatactgataaactacttacattacggcgatatggtcgttcgatgcatgttagataacggacaacaactatcctctacacgactactttgttaataataatctcgtcgatgtaaacgtcgtaaggtttatcgtggaaaatatggacacgcggctgtaaatcacgtatcgaacaatggccgtctatgtatgtacggtctgatattatcgagatttaataattgcgggtatcactgttatgaaaccatactgatagatgtatttgatatactaagcaagtacatggatgatatagatatgatcgataactctactatattacgcggtcgatgtcaataatatacaatttgcaaagcggttattggaatatggagcgagtatcacgctcgataatcaatacggccatccagaaaagcagttacagaagagaaaacaaaacgaaatcgttgttctacaagatgtctctccctacgacgattactacgtaaaaaagatactagcctactgcctattaagggacgagtcattcgcggaactacatagtaaattctgtttaaacgaggactataaaagtgtatttatgaaaaatatatcattcgataagatagattccatcatcgtgacataagtcgcctcaaagagattcgaatctccgacaccgacctgtatacggtatcacagctatcttaaagccatacattcagacagtcacatttcatttcccatgtacgacgatctcatagaacagtgccatctatcgatggagcgtaaaagtaaactcgtcgacaaagcactcaataaattagagtctaccatcggtcaatctagactatcgtatttgcctccggaaattatgcgcaatatcatctaaacagtatgttgtacggaaagaaccattacaaatattatccatgatagaaagaaaatatctatatgattggagaagtaggaaacaggaacaagacaacgattactacattattaaatcatgaagtccgtattatactcgtatatattgtttctctcatgtataataataaacggaagagatatagcaccgcatgcaccatccgatggaaagtgtaaagacaacgaatacaaacgccataatttgtgtccgggaacatacgcttccagattatgcgatagcaagactaacacacgatgtacgccgtgtggttcgggtaccttcacatctcgcaataatcatttacccgcttgtctaagttgtaacggaagacgcgatcgtgtaacacgactcacaatagaatctgtgaatgctctcccggatattattgtcttctcaaaggatcatccggatgcaaggcatgtgtttcccaaacaaaatgtggaataggatacggagtatccggagacgtcatctgttctccgtgtggtctcggaacatattctcacaccgtctcttccgcagataaatgcgaacccgtacccagaaatacgtttaactatatcgatgtggaaattaacctgtatccagttaacgacacgtcgtgtactcggacgaccactaccggtctcagcgaatccatctcaacgtcggaactaactattactatgaatcataaagactgtaatcccgtatttcgtgatggatacttctccgttcttaataaggtagcgacttcaggtttctttacaggagaaaggtgtgcactctgaatttcgagattaaatgcaataacaaagattcttcctccaaacagttaacgaaagcaaagaatgatactatcatgccgcattcggagacagtaactctagtgggcgacatctatatactatatagtaataccaatactcaagactacgaaactgatacaatctcttatcatgtgggtaatgttctcgatgtcgatagccatatgcccggtagttgcgatatacataaactgatcactaattccaaacccacccactttttatagtaagtttttcacccataaataataaatacaataattaatttctcgtaaaagtagaaaatatattctaatttattgcacggtaaggaagtagaatcataaagaacagtactcaatcaatagcaattatgaaacaatatatcgtcctggcatgcatgtgcctggcggcagctgctatgcctgccagtcttcagcaatcatcctcatcctcctcctcgtgtacggaagaagaaaacaaacatcatatgggaatcgatgttattatcaaagtcacaaagcaagaccaaacaccgaccaatgataagatttgccaatccgtaacggaaattacagagtccgagtcagatccagatcccgaggtggaatcagaagatgattccacatcagtcgaggatgtagatcctcctaccacttattactccatcatcggtggaggtctgagaatgaactttggattcaccaaatgtcctcagattaaatccatctcagaatccgctgatggaaacacagtgaatgctagattgtccagcgtgtccccaggacaaggtaaggactctcccgcgatcactcatgaagaagctcttgctatgatcaaagactgtgaagtgtctatcgacatcagatgtagcgaagaagagaaagacagcgacatcaagacccatccagtactcgggtctaacatctctcataagaaagtgagttacgaagatatcatcggttcaacgatcgtcgatacaaaatgcgtcaagaatctagagtttagcgttcgtatcggagacatgtgcaaggaatcatctgaacttgaggtcaaggatggattcaagtatgtcgacggatcggcatctgaaggtgcaaccgatgatacttcactcatcgattcaacaaaactcaaagcgtgtgtctgaatcgataactctattcatctgaaattggatgagtagggttaatcgaacgattcaggcacaccacgaattaaaaaagtgtaccggacactatattccggtttgcaaaacaaaaatgttcttaactacattcacaaaaagttacctctcgcgacttcttctttttctgtctcaatagtgtgatacgattatgacactattcctattcctattcctatttcctttcagagtatcacaaaaatattaaacctctttctgatggtctcataaaaaaagttttacaaaaatatttttattctctttctctctttgatggtctcataaaaaaagttttacaaaaatatttttattctctttctctctttgatggtctcataaaaaaagttttacaaaaatatttttattctctttctctctttgatggtctcataaaaaaagttttacaaaaatatttttattctctttctctctttgatggtctcataaaaaaagttttacaaaaatatttttattctctttctctctttgatggtctcataaaaaaagttttacaaaaatatttttattctctttctctctttgatggtctcataaaaaaagttttacaaaaatatttttattctctttctctctttgatggtctcataaaaaaagttttacaaaaatatttttattctctttctctctttgatggtctcataaaaaaagttttacaaaaatatttttattctctttctctctttgatggtctcataaaaaaagttttacaaaaatatttttattctctttctctctttgatggtctcataaaaaaagttttacaaaaatatttttattctctttctctctttgatggtctcataaaaaaagttttacaaaaatatttttattctctttctctctttgatggtctcataaaaaagttttacaaaaatatttttattctctttctctctttgatggtctcataaaaaagttttacaaaaatatttttattctctttctctctttgatggtctcataaaaaaagttttacaaaaatatttttattctctttctctctttgatggtctcataa

SEQ ID NO: 22 - DNA, 199504 bp, Artificial Sequence
  GLV-1h253
ttatgagaccatcaaagagagaaagagaataaaaatatttttgtaaaactttttttatgagaccatcaaagagagaaagagaataaaaatatttttgtaaaacttttttatgagaccatcaaagagagaaagagaataaaaatatttttgtaaaacttttttatgagaccatcaaagagagaaagagaataaaaatatttttgtaaaactttttttatgagaccatcaaagagagaaagagaataaaaatatttttgtaaaactttttttatgagaccatcaaagagagaaagagaataaaaatatttttgtaaaactttttttatgagaccatcaaagagagaaagagaataaaaatatttttgtaaaactttttttatgagaccatcaaagagagaaagagaataaaaatatttttgtaaaactttttttatgagaccatcaaagagagaaagagaataaaaatatttttgtaaaactttttttatgagaccatcaaagagagaaagagaataaaaatatttttgtaaaactttttttatgagaccatcaaagagagaaagagaataaaaatatttttgtaaaactttttttatgagaccatcaaagagagaaagagaataaaaatatttttgtaaaactttttttatgagaccatcaaagagagaaagagaataaaaatatttttgtaaaactttttttatgagaccatcaaagagagaaagagaataaaaatatttttgtaaaactttttttatgagaccatcaaagagagaaagagaataaaaatatttttgtaaaactttttttatgagaccatcagaaagaggtttaatatttttgtgatactctgaaaggaaataggaataggaataggaatagtgtcataatcgtatcacactattgagacagaaaaagaagaagtcgcgagaggtaactttttgtgaatgtagttaagaacatttttgttttgcaaaccggaatatagtgtccggtacacttttttaattcgtggtgtgcctgaatcgttcgattaaccctactcatccaatttcagatgaatagagttatcgattcagacacacgctttgagttttgttgaatcgatgagtgaagtatcatcggttgcaccttcagatgccgatccgtcgacatacttgaatccatccttgacctcaagttcagatgattccttgcacatgtctccgatacgaacgctaaactctagattcttgacgcattttgtatcgacgatcgttgaaccgatgatatcttcgtaactcactttcttatgagagatgttagacccgagtactggatgggtcttgatgtcgctgtctttctcttcttcgctacatctgatgtcgatagacacttcacagtctttgatcatagcaagagcttcttcatgagtgatcgcgggagagtccttaccttgtcctggggacacgctggacaatctagcattcactgtgtttccatcagcggattctgagatggatttaatctgaggacatttggtgaatccaaagttcattctcagacctccaccgatgatggagtaataagtggtaggaggatctacatcctcgactgatgtggaatcatcttctgattccacctcgggatctggatctgactcggactctgtaatttccgttacggattggcaaatcttatcattggtcggtgtttggtcttgctttgtgactttgataataacatcgattcccatatgatgtttgttttcttcttccgtacacgaggaggaggatgaggatgattgctgaagactggcaggcatagcagctgccgccaggcacatgcatgccaggacgatatattgtttcataattgctattgattgagtactgttctttatgattctacttccttaccgtgcaataaattagaatatattttctacttttacgagaaattaattattgtatttattatttatgggtgaaaaacttactataaaaagtgggtgggtttggaattagtgatcagtttatgtatatcgcaactaccgggcatatggctatcgacatcgagaacattacccacatgataagagattgtatcagtttcgtagtcttgagtattggtattactatatagtatatagatgtcgcccactagagttactgtctccgaatgcggcatgatagtatcattctttgctttcgttaactgtttggaggaagaatctttgttattgcatttaatctcgaaattcagagtgcacacctttctcctgtaaagaaacctgaagtcgctaccttattaagaacggagaagtatccatcacgaaatacgggattacagtctttatgattcatagtaatagttagttccgacgttgagatggattcgctgagaccggtagtggtcgtccgagtacacgacgtgtcgttaactggatacaggttaatttccacatcgatatagttaaacgtatttctgggtacgggttcgcatttatctgcggaagagacggtgtgagaatatgttccgagaccacacggagaacagatgacgtctccggatactccgtatcctattccacattttgtttgggaaacacatgccttgcatccggatgatcctttgagaagacaataatatccgggagagcattcacagattctattgtgagtcgtgttacacgatcgcgtcttccgttacaacttagacaagcgggtaaatgattattgcgagatgtgaaggtacccgaaccacacggcgtacatcgtgtgttagtcttgctatcgcataatctggaagcgtatgttcccggacacaaattatggcgtttgtattcgttgtctttacactttccatcggatggtgcatgcggtgctatatctcttccgtttattattatacatgagagaaacaatatatacgagtataatacggacttcatgatttaataatgtagtaatcgttgtcttgttcctgtttcctacttctccaatcatatagatattttctttctatcatggataatatttgtaatggttctttccgtacaacatactgtttagatgatattgcgcataatttccggaggcaaatacgatagtctagattgaccgatggtagactctaatttattgagtgctttgtcgacgagtttacttttacgctccatcgatagatggcactgttctatgagatcgtcgtacatgggaaatgaaatgtgactgtctgaatgtatggctttaagatagctgtgataccgtatacaggtcggtgtcggagattcgaatctctttgaggcgacttatgtcacgatgatggaatctatcttatcgaatgatatatttttcataaatacacttttatagtcctcgtttaaacagaatttactatgtagttccgcgaatgactcgtcccttaataggcagtaggctagtatcttttttacgtagtaatcgtcgtagggagagacatcttgtagaacaacgatttcgttttgttttctcttctgtaactgcttttctggatggccgtattgattatcgagcgtgatactcgctccatattccaataaccgctttgcaaattgtatattattgacatcgaccgcgtaatatagtagagttatcgatcatatctatatcatccatgtacttgcttagtatatcaaatacatctatcagtatggtttcataacagtgatacccgcaattattaaatctcgataatatcagaccgtacatacatagacggccattgttcgatacgtgatttacagccgcgtgtccatattttccacgataaaccttacgacgtttacatcgacgagattattattaacaaagtagtcgtgtagaggatagttgttgtccgttatctaacatgcatcgaacgaccatatcgccgtaatgtaagtagtttatcagtatggcttgtacgatggattcatcctgttgtctaaatctctttagaatgttatcgatgatgtagtggttatattctctggaatcgtacgaagtaatactacgcattacgtcgacaagagtatgacgtctctcaataagaagattaacgatttccatgtctacattatatggggttactctaaatcgcttgtttagataatacgcctctaatatagggctgacgtcgtatactctacacgtgtccacatcctttattaataataatttaacaatctctatatctatggttgagaaagaccagtagtattggatgggtaaagatcctccttcgtctctgccatggatggaaacattgttatcgatcaaacatttaattacatccttggatagagattgagattctctatgagacgatatatagtaatgaagagagttcttacacatatcactgtcgtacatacaggtacgaaatacgtaaccggtgctgtaacattctgatttaagaagccatagcaatacttctggtctcggattaggcgtcgttacgtatatatccaccaatccgagaccattgattgcataattcgtattcttggacggacgtatccgtttatccacaattaggtattttagcagacgtaagtcgatattatccgaatacagatcgaaatcatttatattcgacttgagttcgttagaggaatttgaatagctggatatcagtagatgcacaatctgagattttacgtatctatgcttactgtatactcctagcggagttaatccttcgttgtttctacaaagtctctcgactccgcgagagaacaatcttaatgtctgtatcgcatttattggagacgtaacaatgtagcgcattgtttcctcgtctatctatatgttttgataagttgtgacacgtttcaatttctagttttatttttttgtacgtcacatcttcatccagtagacgacatagaatagtgcactctctaccacaataatccatagctattctggtgctaattattcctatttcacgaaggcaatcattcctcataagatgataaaaagtgtagtggagatttagtatttagcagtgcggatatgatccaagagggtgagatagtcgttctcgttcagaatctttcgcagcataagtagtatgtcgatatacttatcgttgaagactctttataaaagtctatttgtttatatttattgcggatagcagtatttccctataaaaagtatacgtcctgtggtgtctttaatcatgtacatgaatggatggtttatgtagaccttcgtacgatataccatcgaaaagttaatcgtaaatactcctgtaacggccgatgcttctgtatactcctcattaacatctataaacgtcgtatgtagaaatttttctacagtgatagtttcattacacatcttgctaaaatctgcataatatccgaatatattagtaagtcctaaattttctaaaatcggtaccagattatacggttctgtcatttccactttaaactttggcatatacaagtctatacttttagtagataacataccacaccattttttaaatttttcatctgttatatttttttctatgttatatataccttctatgtcgtccggtagtataattaccatactagagtttccctcgtatggaatatcgataatagagaatcctccgaataattcattaatatgtacatattgcaagttattctcggtacccaccatcatatcaacgctggtaactatattcttagaaatataaaacttgtctgtatatgtaagatgtttagaaaatggatatttccacattgctttaaaatggacggcgctaacaactgtcatacgagtattaatggatagcggactagtcaataaggaattaattttaccatttgtcattgtcttaacccattcgttgattagttcctttgtttggttagcattattaaagtttacagtttgaaaatcgtcttttattttttgtaggaaggaggcgtggaactcgatactatcgctaccgtatattttatttgcggtagctagtgtcgcacaatacggaatatctacctccatgtcatcattattgtcatcgggtgtattctcattcatattctctatatattttgatagttgttcagctgtagaaccagctgctccatgatttagaatagataaagtagataaaatggaaactggagaaatcaaaacattttcatcagggtgttttaagattagttctttaaagatatccatggtatagacctaacgataacgatatatatcataaataaataatgttaaatttcaatttatgtttgtaccccgtattcatacttaacaaattggtattgcgtacacaatcaatcatattacataccattaataatgcaagcataaaaaattgttagtagatgtttctaaatataggttccgtaagcaaagaatataagaatgaagcggtaatgataaaatcaatcgttatctaaaatgatcatactcatttattttattctattatattaacacatacatttttaacagcaacacattcaatattgtattgttatttttatattatttacacaattaacaatatattattagtttatattactgaattaataatataaaattcccaatcttgtcataaacacacactgagaaacagcataaacacagaatccatcaaaaatgttgataaattatctgatgttgttgttcgctgctatgataatcagatcattcgccgatagtggtaacgctatcgaaacgacattgccagaaattacaaacgctacaacagatattccagctatcagattatgcggtccagagggagatggatattgtttacacggtgactgtatccacgctagagatattgacggtatgtattgtagatgctctcatggttatacaggcattagatgtcagcatgtagtattagtagactatcaacgttcagaaaacccaaacactacaacgtcatatatcccatctcccggtattatgcttgtattagtaggcattattatgtgttgtctattatctgtttataggttcactcgacgaactaaactacctatacaagatatggttgtgccataatttttataaatttttttatgagtatttttacaaaaatgtataaagtgtatgtcttatgtatatttataaaaatgctaagtatgcgatgtatctatgttatttgtatttatctaaacaatacctctacctctagatattatacaaaaattttttatttcggcatattaaagtaaaatctagttaccttgaaaatgaatacagtgggtggttccgtatcaccagtaagaacataatagtcaaatacagtatccgattgagattttgcatacaatactagtctagaaagaaatttgtaatcatcttctgtgacgggagtccatatatctgtatcatcgtctagtttatcagtgtcccatgctatattcctgttatcatcattagttaatgaaaataactctcgtgcttcagaaaagtcaaatattgtatccatacatacatctccaaaactatcgcttatacgtttatctttaacgatacctatacctagatggttatttactaacagacattttccagatctattgactataactcctatagtttccacatcaaccaagtaatgatcatctattgttatataacaataacataactcttttccatttttatcagtatgtatatctatatcaacgtcgtcgttgtagtgaatagtagtcattgatctattatatgaaacggatatgtctagaacggcaattgttttacgtccagttaacactttcgttgatttaaagtctagagtctttgcaaacataatatccttatccgactttatatttcctgtagggtggtataattttattttgcctccacatatcggtgtttccaaatatattactagacaatattccatatagttattagttaagggtacccaattagaacacgtacgcttattatcatcatttggatcgtatttcataaaagttattgtgttatcgatgtcaacacattctacattttttaatcgtctatatagtatttttctgatattttctataatatcagaattgtcttccatcggaagttgtatactatcggaatcagttacatgtttaaataattctctgatgtcattccttatacaatcaaattcattattaaacagtttaatagtctgtagacctttatcgtcgtaaatatccattgtcttattagttacgcttatttttatgtgtttttacgttgctttattatattttataagaatgattgtttgacgaatcacgagaactattaagacacattattaggtatatattataaaaaagtttttgattacgatgttataagaggaaagaggacacattaacatcatacatcaattaactacattcttataacatcgtaatcaaaagaattgcaattttgatgtataacaactgtcaatgggttatggaattgtatattacatattatacggtatgttggtaacgacaaataccggtcggtaattgtctgccggtgtaatagaattatatatatctatctattacaccggccttgtatacataataataagttgtggtagtatgatctccatatttataatttaggactttgtattcagtatttttggaatcataaaaaataaaaaaaagttttactaatttaaaatttaaaaagtatttacatttttttcactgtttagtcgcggatatggaattcgatcctgccaaaatcaatacatcatctatagatcatgtaacaatattacaatacatagatgaaccaaatgatataagactaacagtatgcattatccgaaatattatatcaatatcacaaaaataaatacacatttggctaatcaatttcgggcttggaaaaaacgtatcgccggaagggactatatgactaacttatctagagatacaggaatacaacaatcaaaacttactgaaactatacgtaactgtcaaaaaaatagaaacatatatggtctatatatacactacaatttagttattaattggataaccgatgtgattatcaatcaatattaagagggttggtaaattggtacatagctaataatacctatactccaaatacacccaataatacaacaaccatttctgagttggatatcatcaaaatactaaataaatacgaggacgtgtatagagtaagtaaagaaaaagaatgtggaatttgctatgaagttgtttactcaaaacgatagatactttggtttattggattcgtgtactcatatattttgcataacatgcatcaatatatggcatagaacacgaagagaaaccggtgcgtcggataattgtcctatatgccgtacccgttttagaaacataacaatgagcaagttctataagctagttaactaataaataaaaagtttaatttgttgacgacgtatgtcgttattttttctcgtataaaagattaatttgattctaatataatctttagtattggataaatatcaattcaaattaattccattagattatatcataaataaaaatagtagcacacaactacttcagcaaacattctttttataaatgccatctagcgtagcgaggacacaagtgaacctataattatcaaatttattagtatcagtcacatgaaggactttacgtagagtgacgattccactatctgtggtacgaacggtttcatcttctttgatgccatcacccagatgttctataaacttggtatcctcgtccgatttcatatcctttgccaaccaatacatatagctaaactcaggcatatgttccacacatcctgaacaatgaaattctccagaagatgttacaatgtctagatttggacatttggtttcaaccgcgttaacatatgagtgaacacacccatacatgaaagcgatgagaaataggattctcatcttgccaaaatatcactagaaaaaatttatttatcagttttaaaggtataaaaaatacttattgttgctcgaatattttgtatttgatggtatacggaagattagaaatgtaggtattatcatcaactgattctatggttttatgtattctatcatgtttcactattgcgttggaaataatatcatatgcttccacatatattttattttgttttaactcataatactcacgtaattctggattattggcatatctatgaataattttagctccatgatcagtaaatattaatgagaacatagtattaccacctaccattatttttttcatctcattcaattcttaattgcaaagatctatataatcattatagcgttgacttatggactctggaatcttagacgatgtacagtcatctataatcatggcatatttaatacattgttttatagcatagtcgttatctacgatgttagatatttctctcaatgaatcaatcacacaatctaatgtaggtttatgacataatagcattttcagcagttcaatgtttttagattcgttgatggcaatggctatacatgtatatccgttatttgatctaatgttgacatctgaaccggattctagcagtaaagatactagagattgtttattatatctaacagccttgtgaagaagtgtttctcctcgtttgtcaatcatgttaatgtctttaagataaggtaggcaaatgtttatagtactaagaattgggcaagcataagacatgtcacaaagacccttttttgtatgtataagtgtaaaaattataacatccatagttggatttacataggtgtccaatcgggatctctccatcatcgagataattgatggcatctcccttccttttttagtagatatttcatcgtgtaagaatcaatattaatatttctaaagtatccgtgtatagcctctttatttaccacagctccatattccactagagggatatcgccgaatgtcatatactcaattagtatatgttggaggacatccgagttcattgttttcaatatcaaagagatggtttccttatcatttctccatagtggtacaatactacacattattccgtgcggctttccattttccaaaaacaatttgaccaaatctaaatctacatctttattgtatctataatcactatttagataatcagccataattcctcgagtgcaacatgttagatcgtctatatatgaataagcagtgttatctattcctttcattaacaatttaacgatgtctatatctatatgagatgacttaatataatattgaagagctgtacaatagtttttatctataaaagacggcttgattccgtgattaattagacatttaacaacttccggacgcacatatgctctcgtatccgactctgaatacagatgagagatgatatacagatgcaatacggtaccgcaatttcgtagttgataatcatcatacgcgtatcagtactcgtcctcataaagaacactgcagccattttctatgaacaaatcaataattttagaaacaggatcattgtcattacataattttctataactgaacgatggttttcacatttaacactcaagtcaaatccatgttctaccaacacctttatcaagtcaacgtctacatttttggatttcatatagctgaatatattaaagttatttatgttgctaaatccagtggcttctagtagagccatcgctatatccttattaactttaacatgtctactatttgtgtattcttctaatggggtaagctgtctccaatttttgcgtaatggattagtgccactgtctagtagtagtttgacgacctcgacattattacaatgctcattaaaaaggtatgcgtgtaaagcattattcttgaattggttcctggtatcattaggatctctgtctttcaacatctgtttaagttcatcaagagccacctcctcattttccaaatagtcaaacattttgactgaatgagctactgtgaactctatacacccacacaactaatgtcattaaatatcatgtcaaaaacttgtacaattattaataaaaataatttagtgtttaaattttaccagttccagattttacacctccgttaatacctccattaaccccactggacgatcctcctccccacattccaccgccaccagatgtataagttttagatcctttattactaccatcatgtccatggataaagacactccacatgccgccactaccccctttagaagacatattaataagacttaaggacaagtttaacaataaaattaatcacgagtaccctactaccaacctacactattatatgattatagtttctatttttacagtaccttgactaaagtttctagtcacaagagcaatactaccaacctacactattatatgattatagtttctatttttataggaacgcgtacgagaaaatcaaatgtctaatttctaacggtagtgttgataaacgattgttatccgcggatacctcctctatcatgtcgtctattttcttactttgttctattaacttattagcattatatattatttgattataaaacttatattgcttattagcccaatctgtaaatatcggattattaacatatcgtttctttgtaggtttatttaacatgtacatcactgtaagcatgtccttaccatttattttaatttgacgcatatccgcaatttctttttcgcagtcggttataaattctatatatgatggatacatgctacatgtgtacttataatcgactaatatgaagtacttgatacatattttcagtaacgatttattattaccacctatgaataagtacctgtgatcgtctaggtaatcaactgttttcttaatacattcgatggttggtaatttactcagaataatttccaatatcttaatatataattctgctatttctgggatatatttatctgccagtataacacaaatagtaatacatgtaaacccatattttgttattatattaatgtctgcgccattatctattaaccattctactaggctgacactatgcgactcaatacaatgataaagtatactacatccatgtttatctattttgtttatatcatcaatatacggcttacaaagttttagtatcgataacacatccaactcacgcatagagaaggtagggaataatggcataatatttattaggttatcatcattgtcattatctacaactaagtttccattttttaaaatatactcgacaactttaggatctctattgccaaatttttgaaaatatttatttatatgcttaaatctatataatgtagctccttcatcaatcatacatttaataacattgatgtatactgtatgataagatacatattctaacaatagatcttgtatagaatctgtatatcttttaagaattgtggatattaggatattattacataaactattacacaattctaaaatataaaacgtatcacggtcgaataatagttgatcaactatataattatcgattttgtgatttttcttcctaaactgtttacgtaaatagttagatagaatattcattagttcatgaccactatagttactatcgaataacgcgtcaaatatttcccgtttaatatcgcatttgtcaagataataatagagtgtggtatgttcacgataagtataataacgcatctctttttcgtgtgaaattaaatagtttattacgtccaaagatgtagcataaccatcttgtgacctagtaataatataataatagagaactgttttacccattctatcatcataatcagtggtgtagtcgtaatcgtaatcgtctaattcatcatcccaattataatattcaccagcacgtctaatctgttctattttgatcttgtatccatactgtatgttgctacatgtaggtattcctttatccaataatagtttaaacacatctacattgggatttgatgttgtagcgtatttttctacaatattaataccatttttgatactatttatttctatacctttcgaaattagtaatttcaataagtctatattgatgttatcagaacatagatattcgaatatatcaaaatcattgatatttttatagtcgactgacgacaataacaaaatcacaacatcgtttttgatattattatttttcttggtaacgtatgcctttaatggagtttcaccatcatactcatataatggatttgcaccactttctatcaatgattgtgcactgctggcatcgatgttaaatgttttacaactatcatagagtatcttatcgttaaccatgattggttgttgatgctatcgcattttttggtttctttcatttcagttatgtatggatttagcacgtttgggaagcatgagctcatatgatttcagtactgtagtgtcagtactattagtttcaataagatcaatctctagatctatagaatcaaaacacgataggtcagaagataatgaatatctgtaggcttcttgttgtactgtaacttctggttttgttagatggttgcatcgtgctttaacgtcaatggtacaaattttatcctcgctttgtgtatcatattcgtccctactataaaattgtatattcagattatcatgcgatgtgtatacgctaacggtatcaataaacggagcacaccatttagtcataaccgtaatccaaaaatttttaaagtatatcttaacgaaagaagttgtgtcattgtctacggtgtatggtactagatcctcataagtgtatatatctagagtaatgtttaatttattaaatggttgataatatggatcctcgtgacaatttccgaagatggaaataagacataaacacgcaataaatctaattgcggacatggttactccttaaaaaaatacgaataatcaccttggctatttagtaagtgtcatttaacactatactcatattaatccatggactcataatctctatacgggattaacggatgttctatatacggggatgagtagttctcttctttaactttatactttttactaatcatatttagactgatgtatgggtaatagtgtttgaagagctcgttctcatcatcagaataaatcaatatctctgtttttttgttatacagatgtattacagcctcatatattacgtaatagaacgtgtcatctaccttattaactttcaccgcatagttgtttgcaaatacggttaatcctttgacctcgtcgatttccgaccaatctgggcgtataatgaatctaaactttaattgcttgtaatcattcgaaataatttttagtttgcatccgtagttatcccctttatgtaactgtaaatttctcaacgcgatatctccattaataatgatgtcgaattcgtgctgtatacccatactgaatggatgaacgaataccgacggcgttaatagtaatttactttttcatctttacatattgggtactagttttactatcataagtttataaattccacaagctactatggaataagccaaccatcttagtataccacacatgtcttaaagtttattaattaattacatgttgttttatatatatcgctacgaatttaaagagaaattagtttaggaagaaaaattatctatctacatcatcacgtctctgtattctacgatagagtgctactttaagatgcgacagatccgtgtcatcaaatatatactccattaaaatgattattccggcagcgaacttgatattggatatatcacaacctttgttaatatctacgacaatagacagcagtcccatggttccataaacagtgagtttatctttctttgaagagatattttgtagagatcttataaaactgtcgaatgacatcgcatttatatctttagctaaatcgtatatgttaccatcgtaatatctaaccgcgtctatcttaaacgtttccatcgctttaaagacgtttccgatagatggtctcatttcatcagtcatactgagccaacaaatataatcgtgtataacatctttgatagaatcagactctaaagaaaacgaatcggctttattatacgcattcatgataaacttaatgaaaaatgtttttcgttgtttaagttggatgaatagtatgtcttaataattgttattatttcattaattaatatttagtaacgagtacactctataaaaacgagaatgacataactaatcataactagttatcaaagtgtctaggacgcgtaattttcatatggtatagatcctgtaagcattgtctgtattctggagctattttctctatcgcattagtgagttcagaatatgttataaatttaaatcgaataacgaacataactttagtaaagtcgtctatattaactcttttattttctagccatcgtaataccatgtttaagatagtatattctctagttactacgatctcatcgttgtctagaatatcacatactgaatctacatccaattttagaaattggtctgtgttacatatctcttctatattattgttgatgtattgtcgtagaaaactattacgtagaccattttctttataaaacgaatatatagtactccaattatctttaccgatatatttgcacacataatccattctctcaatcactacatctttaagattttcgttgttaagatatttggctaaactatataattctattagatcatcaacagaatcagtatatatttttctagatccaaagacgaactctttggcgtcctctataatattcccagaaaagatattttcgtgttttagtttatcgagatctgatctgttcatatacgccatgattgtacggtacgttatgataaccgcataaaataaaaatccattttcatttttaaccaatactattcataattgagattgatgtaatactttgttactttgaacgtaaagacagtacacggatccgtatctccaacaagcacgtagtaatcaaatttggtgttgttaaacttcgcaatattcatcaatttagatagaaacttatactcatcatctgttttaggaatccatgtattattaccactttccaacttatcattatcccaggctatgtttcgtccatcatcgttgcgcagagtgaataattcttttgtattcggtagttcaaatatatgatccatgcatagatcggcaaagctattgtagatgtgatttttcctaaatctaatataaaactcgtttactagcaaacactttcctgatttatcgaccaagacacatatggtttctaaatctatcaagtggtggggatccatagttatgacgcagtaacatatattattacattcttgactgtcgctaatatctaaatatttattgttatcgtattggattctgcatatagatggcttgtatgtcaaagatatagaacacataaccaatttatagtcgcgctttacattctcgaatctaaagttaagagatttagaaaacattatatcctcggatgatgttatcactgtttctggagtaggatatattaaagtctttacagatttcgtccgattcaaataaatcactaaataatatcccacattatcatctgttagagtagtatcattaaatctattatattttatgaaagatatatcactgctcacctctatatttcgtacatttttaaactgtttgtataatatctctctgatacaatcagatatatctattgtgtcggtagacgataccgttacatttgaattaatggtgttccattttacaacttttaacaagttgaccaattcatttctaatagtatcaaactctccatgattaaatattttaatagtatccattttatatcactacggacacaaagtagctgacataaaccattgtataatttttatgttttatgtttattagcgtacacattttggaagttccggcttccatgtatttcctggagagcaagtagatgatgaggaaccagatagtttatatccgtacttgcacttaaagtctacattgtcgttgtatgagtatgatcttttaaacccgctagacaagtatccgtttgatattgtaggatgtggacatttaacaatctgacacgtgggtggatcggaccattctcctcctgaacacaggacactagagttaccaatcaacgaatatccactattgcaactataagttacaacgctcccatcggtataaaaatcctcgtatccgttatgtcttccgttggatatagatggaggggattggcatttaacagattcacaaataggtgcctcgggattccataccatagatccagtagatcctaattcacaatacgatttagattcaccgatcaactgatatccgctattacaagagtacgttatactagagccaaagtctactccaccaatatcaagttggccattatcgatatctcgaggcgatgggcatctccgtttaatacattgattaaagagtgtccatccagtacctgtacatttagcatatataggtcccattttttgctttctgtatccaggtagacatagatattctatagtgtctcctatgttgtaattagcattagcatcagtctccacactattcttaaatttcatattaatgggtcgtgacggaatagtacagcatgatagaacgcatcctattcccaacaatgtcaggaacgtcacgctctccaccttcatatttatttatccgtaaaaatgttatcctggacatcgtacaaataataaaaagcccatatatgttcgctattgtagaaattgtttttcacagttgctcaaaaacgatggcagtgacttatgagttacgttacactttggagtctcatctttagtaaacatatcataatattcgatattacgagttgacatatcgaacaaattccaagtatttgattttggataatattcgtattttgcatctgctataattaagatataatcaccgcaagaacacacgaacatctttcctacatggttaaagtacatgtacaattctatccatttgtcttccttaactatatatttgtatagataattacgagtctcgtgagtaattccagtaattacatagatgtcgccgtcgtactctacagcataaactatactatgatgtctaggcatgggagacttttttatccaacgatttttagtgaaacattccacatcgtttaatactacatatttctcatacgtggtataaactccacccattacatatatatcatcgtttacgaataccgacgcgcctgaatatctaggagtaattaagtttggaagtcttatccatttcgaagtgccgtgtttcaaatattctgccacacccgttgaaatagaaaattctaatcctcctattacatataactttccatcgttaacacaagtactaacttctgattttaacgacgacatattagtaaccgttttccattttttcgttttaagatctacccgcgatacggaataaacatgtctattgttaatcatgccgccaataatgtatagacaattatgtaaaacatttgcattatagaattgtctatctgtattaccgactatcgtccaatattctgttctaggagagtaatgggttattgtggatatataatcagagtttttaatgactactatattatgttttataccatttcgtgtcactggctttgtagatttggatatagttaatcccaacaatgatatagcattgcgcatagtattagtcataaacttgggatgtaaaatgttgatgatatctacatcgtttggatttttatgtatccactttaataatatcatagctgtaacatcctcatgatttacgttaacgtcttcgtgggataagatagttgtcagttcatcctttgataattttccaaattctggatcggatgtcaccgcagtaatattgttgattatttctgacatcgacgcattatatagttttttaattccatatcttttagaaaagttaaacatccttatacaatttgtgaaattaatattatgaatcatagtttttacacatagatctactacaggcggaacatcaattattatggcagcaactagtatcatttctacattgtttatggtgatgtttatcttcttccagcgcatatagtctaatagcgattcaaacgcgtgatagtttataccattcaatataatcgcttcatcctttagatggtgatcctgaatgcgtttaaaaaaattatacggagacgccgtaataatttccttattcacttgtataatttccccattgatagaaaatattacgctttccattcttaaagtactataagtaattatagtataatgtaaacgtttatatattcaatatttttataaaaatcattttgacattaattcctttttaaatttccgtctatcatctatagaaacgtattctatgaatttataaaatgcttttacgtgtcctatcgtaggcgatagaaccgctaaaaagcctatcgaatttctacaaaagaatctgttatatggtatagggagagtataaaacattaaatgtccgtacttattaaagtattcagtagccaatcctaactctttcgaatacttattaatggctcttgttctgtacgaatctatttttttgaacaacggacctagtggtatatcttgttctatgtatctaaaataatgtctgactagatccgttagtttaatatccgcagtcatcttgtctagaatggcaaatctaactgcgggtttaggctttagtttagtttctatatctacatctatgtctttatctaacaccaaaaatataatagctaatattttattacaatcatccggatattcttctacgatctcactaactaatgtttctttggttatactagtatagtcactatcggacaaataaagaaaatcagatgatcgatgaataatacatttaaattcatcatctgtaagatttttgagatgtctcattagaatattattagggttagtactcattatcattcggcagctattacttattttattatttttcaccatatagatcaatcattagatcatcaaaatatgtttcaatcatcctaaagagtatggtgaatgactcttcccatctaatttctgaacgttcaccaatgtctctagccactttggcactaatagcgatcattcgcttagcgtcttctatattattaactggttgatttaatctatctagcaatggaccgtcggacagcgtcattctcatgttcttaatcaatgtacatacatcgccgtcatctaccaattcatccaacaacataagctttttaaaatcatcattataataggtttgatcgttgtcatttctccaaagaatatatctaataagtagagtcctcatgcttagttaacaactattttttatgttaaatcaattagtacaccgctatgtttaatacttattcatattttagtttttaggattgagaatcaatacaaaaattaatgcatcattaattttagaaatacttagtttccacgtagtcaatgaaacatttgaactcatcgtacaggacgttctcgtacaggacgtaactataaaccggtttatatttgttcaagatagatacaaatccgataactttttttacgaattctacgggatccactttaaaagtgtcataccgggttctttttatttttttaaacagatcaatggtgtgatgttgattaggtcttttacgaatttgatatagaatagcgtttacatattctccataatggtcaatcgccatttgttcgtatgtcataaattctttaattatatgacactgtgtattatttagttcatccttgttcattgttaggaatctatccaaaatggcaattatactagaactataggtgcgttgtatacacatattgatgtgtctgtttatacaatccatgatatttggatccatgctactaccttcgggtaaaattgtagcatcatataccatttctagtactttaggttcattattatccattgcagaggacgtcatgatcgaatcataaaaaaatatattatttttatgttattttgttaaaaataatcatcgaatacttcgtaagatactccttcatgaacataatcagttacaaaacgtttatatgaagtaaagtatctacgatttttacaaaagtccggatgcataagtacaaagtacgcgataaacggaataataatagatttatctagtctatctttttctatagctttcatagttagatacatggtctcagaagtaggattatgtaacatcagcttcgataaaatgactgggttatttagtcttacacattcgctcatacatgtatgaccgttaactacagagtctacactaaaatgattgaacaatagatagtctaccattgtttcgtattcagatagtacagcgtagtacatggcatcttcacaaattatatcattgtctaatagatatttgacgcatcttatggatcccacttcaacagccatcttaaaatcatattgctttcctttatcattaataatttctagaacatcatctctatcataaaagatacaaatattaactgtttgatccgtaataacattgctagtcaatagcaatttgttaataagatgcgctgggctcaatgtcttaataagaagtgtaagaggactatctccgaatttgttttgtttattaacatccgttgatggaagtaaaagatctataatgtctacattcttgactgttttagagcatacaatatggagaggtgtatttccatcatgatctggttttgagggactaattcctagtttcatcatccatgagattgtagaagcttttggattgtctgacataagatgtctatgaatatgatttttgccaaatttatccactatcctggcttcgaatccgatggacattatttttttaaacactctttctgaaggatctgtacacgccaacaacggaccacatccttcttcatcaaccgagttgttaatcttggctccatactgtaccaataaatttattctctctatgacttcatcatctgttcccgagagataatatagaggtgttttatgctgtttatcacacgcgtttggatctgcgccgtgcgtcagcagcatcgcgactattctattattattaattttagaagctatatgcaatggataatttccatcatcatccgtctcatttggagagtatcctctatgaagaagttcttcgacaaatcgttcatctagtcctttaattccacaatacgcatgtagaatgtgataattatttccagaaggttcgatagcttgtagcatattcctaaatacatctaaatttttactattatatttggcataaagagatagataatactcggccgacataatgttgtccattgtagtataaaaattaatatttctatttctatttctgtatatttgcaacaatttactctctataacaaatatcataacttagtttttttatgtcaagaaggcactggtttagttcatctataaatgtcacgccataactaccacgcatgccatactcagaattatgataaagatatttatccttggggtgtaggtaatggggattaatctttgttggatcagtctctaagttaacacatgtcacacatgatccatttatagttatatcacacgatgatgatttatgaattgattccggaagatcgctatcgtattttgtggttccacaattcatttccatacatgttattgtcacactaatattatgatgaactttatctagccgctgagtggtaaacaacagaacagatagtttattatctttaccaacaccctcagccgctgccacaaatctctgatccgtatccatgatggtcatgtttatttctagtccgtatccagtcaacactatgttagcatttctgtcgatatagctttcactcatatgacactcaccaataatagtagaattaatgtcgtaatttacaccaatagtgagttcggcggcaaagtaccaataccggtaatcttgtcgaggaggacatatagtattcttgtattctaccgaatacccgagagatgcgatacaaaagagcaagactaatttgtaaaccatcttactcaaaatatgtaacaatagtacgatgcaatgagtaagacaataggaaatctatcttatatacacataattattctatcaattttaccaattagttagtgtaatgttaacaaaaatgtgggagaatctaattagtttttctttacacaattgacgtacatgagtctgagttccttgtttttgctaattatttcatccaatttattattcttgacgatatcgagatcttttgtataggagtcaaacttgtattcaacatgcttttctataatcattttagctatttcggcatcatccaatagtacattttccagattagcagaatagatattaatgtcgtatttgaacagagcctgtaacatctcaatgtctttattatctatagccaatttaatgtccggaatgaagagaagggaattattggtgtttgtcgacgtcatatagtcgagcaagagaatcatcatatccacgtgtccattttttatagtgatgtgaatacaactaaggagaatagccagatcaaaagtagatggtatctctgaaagaaagtaggaaacaatacttacatcattaagcatgacggcatgataaaatgaagttttccatccagttttcccatagaacatcagtctccaatttttcttaacaaacagttttaccgtttgcatgttaccactatcaaccgcataatacaatgcggtgtttcccttgtcatcaaattgtgaatcatccagtccactgaatagcaaaatctttactattttggtatcttccaatgtggctgcctgatgtaatggaaattcattctctagaagatttttcaatgctccagcgttcaacaacgtacatactagacgcacgttattatcagctattgcataatacaaggcactatgtccatggacatccgccttaaatgtatctttactagagagaaagcttttcagctgcttagacttccaagtattaattcgtgacagatccatgtctgaaacgagacgctaattagtgtatattttttcattttttataattttgtcatattgcaccagaattaataatatctttaatagatctgattagtagatacatggctatcgcaaaacaacatatacacatttaataaaaataatatttattaagaaaattcagatttcacgtacccatcaatataaataaaataatgattccttacaccgtacccatattaaggagattccaccttacccataaacaatataaatccagtaatatcatgtctgatgatgaacacaaatggtgtattaaattccagtttttcaggagatgatctcgccgtagctaccataatagtagatgcctctgctacagttccttgttcgtcgacatctatctttgcattctgaaacattttataaatatataatgggtccctagtcatatgtttaaacgacgcattatctggattaaacatactaggagccatcatttcggctatcgacttaatatccctcttattttcgatagaaaatttagggagtttaagattgtacactttattccctaattgagacgaccaatagtctaattttgcagccgtgatagaatctgtgaaatgggtcatattatcacctattgccaggtacatactaatattagcatccttatacggaaggcgtaccatgtcatattctttgtcatcgattgtgattgtatttccttgcaatttagtaactacgttcatcatgggaaccgttttcgtaccgtacttattagtaaaactagcattgcgtgttttagtgatatcaaacggatattgccatatacctttaaaatatatagtattaatgattgcccatagagtattattgtcgagcatattagaatctactacattagacataccggatctacgttctactatagaattaattttattaaccgcatctcgtctaaagtttaatctatataggccgaatctatgatattgttgataatacgacggtttaatgcacacagtattatctacgaaactttgataagttagatcagtgtacgtatatttagatgttttcagcttagctaatcctgatattaattctgtaaatgctggacccagatctctttttctcaaatccatagtcttcaataattctattctagtattacctgatgcaggcaatagcgacataaacatagaaaacgaataaccaaacggtgagaagacaatattatcatcttgaatatttttatacgctactataccggcattggtaaatccttgtagacgataggcggacgctgaacacgctaacgatagtatcaataacgcaatcatgattttatggtattaataattaaccttatttttatgttcggtataaaaaaattattgatgtctacacatccttttgtaattgacatctatatatccttttgtataatcaactctaatcactttaacttttacagttttccctaccagtttatccctatattcaacatatctatccatatgcatcttaacactctctgccaagatagcttcagagtgaggatagtcaaaaagataaatatatagagcataatcattctcgtatactctgccctttattacatcacccgcattgggcaacgaataacaaaatgcaagcatcttgttaacgggctcgtaaattgggataaaaattatgtttttattgtcttatatctattttattcaagagaatattcaggaatttctttttccggttgtatctcgtcgcagtatatatcatttgtacattgtttcatattttttaatagtttacaccttttagtaggactagtatcgtacaattcatagctgtattttgaattccaatcacgcataaaaatatcttccaattgttgacgaagacctaatccatcatccggtgtaatattaatagatgctccacatgtatccgtaaagtaatttcctgtccaatttgaggtacctatataggccgttttatcggttaccatatatttggcatggtttaccctagaatacggaatgggaggatcagcatctggtacaataaatagctttacttctatatttatgtttttagattttagcatagcgatagatcttaaaaagtttctcatgataaacgaagatcgttgccagcaactaatcaatagcttaacggatacttgtctgtctatagcggatcttcttaattcatcttctatataaggccaaaacaaaattttacccgccttcgaataaataatagggataaagttcataacagatacataaacgaatttactcgcatttctaatacatgacaataaagcggttaaatcattggttctttccatagtacatagttgttgcggtgcagaagcaataaatacagagtgtggaacgccgcttacgttaatactaagaggatgatctgtattataatacgacggataaaagtttttccaattatatggtagattgttaactccaagataccagtatacctcaaaaatttgagtgagatccgctgccaagttcctattattgaagatcgcaatacccaattccttgacctgagttagtgatctccaatccatgttagcgcttcctaaataaatatgtgtattatcagatatccaaaattttgtatgaagaactcctcctaggatatttgtaatatctatgtatcgtacttcaactccggccatttgtagtctttcaacatcctttaatggtttgttagatttattaacggctactctaactcgtactcctcttttgggtaattgtacaatctcgtttaatattatcgtgccgaaattcgtacccacttcatccgataaactccaataaaaagatgatatatctagtgtttttgtggtattggatagaatttccctccacatgttaaatgtagacaaatatactttatcaaattgcatacctataggaatagtttctgtaatcactgcgattgtattatccggattcattttatttgttaaaagaataatcctatatcacttcactctattaaaaatccaagtttctatttctttcatgactgattttttaacttcatccgtttccttatgaagatgatgtttggcaccttcataaatttttatttctctattacaatttgcatgttgcatgaaataatatgcacctaaaacatcgctaatcttattgtttgttccctggagtatgagagtcggggggtgttaatcttggaaattatttttctaaccttgttggtagccttcaagacctgactagcaaatccagccttaattttttcatgattgactaatgggtcgtattggtatttataaactttatccatatctctagatactgattctggacatagctttccgactggcgcatttggtgtgatggttcccataagtttggcagctagcagattcagtcttgaaacagcatctgcattaactagaggagacattagaatcattgctgtaaacaagtttggattatcgtaagaggctagctcccatggaatgacccaataagtagatttaatagttaccacgtgctgtaccaaagtcatcaatcatcattttttcaccattacttcttccatgtccaatatgatcatgtgagaatactaaaattcctaacgatgatatgttttcagctagttcgtcataacgtccagaatgtttaccagctccatgacttatgaatactaatgccttaggatatgtaataggtttccaatatttacaatatatgtaatcattgtccagattgaacatacagtttgcactcatgattcacgttatataactatcaatattaacagttcgtttgatgatcatattatttttatgttttattgataattgtaaaaacatacaattaaatcaatatagaggaaggagacggctactgtcttttgtaagatagtcatggcgactaaattagattatgaggatgctgttttttactttgtggatgatgataaaatatgtagtcgcgactccatcatcgatctaatagatgaatatattacgtggagaaatcatgttatagtgtttaacaaagatattaccagttgtggaagactgtacaaggaattgatgaagttcgatgatgtcgctatacggtactatggtattgataaaattaatgagattgtcgaagctatgagcgaaggagaccactacatcaattttacaaaagtccatgatcaggaaagtttattcgctaccataggaatatgtgctaaaatcactgaacattggggatacaaaaagatttcagaatctagattccaatcattgggaaacattacagatttgatgaccgacgataatataaacatcttgatactttttctagaaaaaaaattgaattgatgatataggggtcttcataacgcataattattacgttagcattctatatccgtgttaaaaaaaattatcctatcatgtatttgagagttttatatgtagcaaacatgatagctgtgatgccaataagctttagatattcacgcgtgctagtgttagggatggtattatctggtggtgaaatgtccgttatataatctacaaaacaatcatcgcatatagtatgcgatagtagagtaaacatttttatagtttttactggattcatacatcgtctacccaattcggttataaatgaaattgtcgccaatcttacacccaaccccttgttatccattagcatagtattaacttcgttatttatgtcataaactgtaaatgattttgtagatgccatatcatacatgatattcatgtccctattataatcattactaactttatcacaatatatgttgataatatctatatatgatctagtctttgtgggcaactgtctatacaagtcgtctaaacgttgtttactcatatagtatcgaacagccatcattacatggtcccgttccgttgatagataatcgagtatgttagtggacttgtcaaatctatataccatattttctggaagtggatatacatagtcgtgatcaacattattgctagcctcatcttctatatcctgtactataccattatctatatcatctacataatctatgatattattacacataaacatcgacaacatactattgtttattatctaagtcctgttgatccaaacccttgatctcctctatttgtactatctagagattgtacttcttccagttctggataatatatacgttgatagattagctgagctattctatctccagtatttacattaaacgtacattttccattattaataagaatgactcctatgtttcccctataatcttcgtctattacaccacctcctatatcaatgccttttagtgacagaccagacctaggagctattctaccatagcagaacttaggcatggacatactaatatctgtcttaattaactgtctttctcctggagggatagtataatcgtaagcgctatacaaatcatatccggcagcacccggcgattgcctagtaggagatttagctctgttagtttccttaacaaatctaactggtgagttaatattcatgttgaacataaaactaatattttatttcaaaattatttaccatcccatatattccatgaataagtgtgatgattgtacacttctatagtatctatatacgatccacgataaaatcctcctatcaatagcagtttattatccactatgatcaattctggattatccctcggataaataggatcatctatcagagtccatgtattgctggattcacaataaaattccgcatttctaccaaccaagaataaccttctaccgaacactaacgcgcatgatttataatgaggataataagtggatggtccaaactgccactgatcatgattgggtagcaaatattctgtagttgtatcagtttcagaatgtcctcccattacgtatataacattgtttatggatgccactgctggattacatctaggtttcagaagactcggcatattaacccaagcagcatccccgtggaaccaacgctcaacagatgtgggatttggtagacctcctactacgtataatttattgttagcgggtatcccgctagcatacagtctggggctattcatcggaggaattggaatccaattgtttgatatataatttacagctatagcattgttatgtatttcattgttcatccatccaccgatgagatatactacttctccaacatgagtacttgtacacatatggaatatatctataatttgatccatgttcataggatactctatgaatggatacttgtatgatttgcgtggttgtttatcacaatgaaatattttggtacagtctagtatccattttacattatttatacctctgggagaaagataatttgacctgattacatttttgataaggagtagcagatttcctaatttatttcttcgcctcatataccacttaatgacaaaatcaactacataatcctcatctggaacatttagttcatcgctttctagaataagtttcatagatagataatcaaaattgtctatgatgtcatcttccagttccaaaaagtgtttggcaataaagtttttagtatgacataagagattggatagtccgtattctatacccatcatgtaacactcgacacaatattcctttctaaaatctcgtaagataaagtttatacaagtgtagatgataaattctacagaggttaatatagaagcacgtaataaattgacgacgttatgactatctatatatacctttccagtatatgagtaaataactatagaagttaaactgtgaatgtcaaggtctagacaaacccttgtaactggatctttatttttcgtgtatttttgacgtaaatgtgtgcgaaagtaaggagataactttttcaatatcgtagaattgactattatattgcctcctatggcatcaataattgttttgaatttcttagtcatagacaatgctaatatattcttacagtacacagtattgacaaatatcggcatttatgtttctttaaaagtcaacatctagagaaaaatgattatctttttgagacataactcccattttttggtattcacccacacgtttttcgaaaaaattagtttttccttccaatgatatattttccatgaaatcaaacggattggtaacattataaatttttttaaatcccaattcagaaatcaatctatccgcgacgaattctatatatgttttcatcatttcacaattcattcctataagtttaactggaagagccgcagtaagaaattcttgttcaatggatactgcatctgttataatagatctaacggtttcttcactcggtggatgcaataaatgtttaaacatcaaacatgcgaaatcgcagtgcagaccctcgtctctactaattagttcgttggaaaacgtgagtccgggcattaggccacgctttttaagccaaaatatggaagcgaatgatccagaaaagaaaattccttctactgcagcaaaggcaataagtctctctccataaccggcgctgtcatgtatccacttttgagcccaatcggccttcttttttacacaaggcatcgtttctatggcattaaagagatagtttttttcattactatctttaacataagtatcgatcaaaagactatacatttccgaatgaatgttttcaatggccatctgaaatccgtagaaacatctagcctcggtaatctgtacttctgtacaaaatcgttccgccaaattttcattcactattccgtcactggctgcaaaaaacgccaatacatgttttataaaatatttttcgtctggtgttagtttattccaatcattgatatctttagatatatctacttcttccactgtccaaaatgatgcctctgcctttttatacatgttccagatgtcatgatattggattgggaaaataacaaatctatttggatttggtgcaaggatgggttccataactaaattaacaataacaataaattttttttcagttatctatatgcctgtacttggattttttgtacatcgatatcgccgcaatcactacaataattacaagtattattgatagcattgttattagtactatcataattaaattatctacattcatgggtgctgaataatcgttattatcatcattatcattttgtaattgtgacatcatactagataaatcgtttgcgagattgttgtgggaagcgggcatggaggatgcattatcattattatttaacgccttccatttggattcacaaatgttacgcacattcaacattttatggaaactataattttgtgaaaacaaataacaagaaaactcgtcatcgttcaaatttttaacgatagtaaaccgattaaacgtcgagctaatttctaacgctagcgactctgttggatatgggtttccagatatatatcttttcagttcccctacgtatctataatcatctgtaggaaatggaagatatttccatttatctactgttcctaatatcatatgtggtggtgtagtagaaccattaagcgcgaaagatgttatttcgcatcgtattttaacttcgcaataatttctggttagataacgcactctaccagtcaagtcaatgatattagcctttacagatatattcatagtagtcgtaacgatgactccatcttttagatgcgatactcctttgtatgtaccagaatcttcgtacctcaaactcgatatatttaaacaagttaatgagatattaacgcgttttatgaatgatgatatataaccagaagttttatcctcggtggctagcgctataaccttatcattataataccaactagtgtgattaatatgtgacacgtcagtgtgggtacaaatatgtacattatcgtctacgtcgtattcgatacatccgcatacagccaacaaatataaaatgacaaatactctaacgccgttcgtacccatcttgatgcggtttaataaatgttttgatttcaatttattgtaaaaaaagattcggttttatactgttcgatattctcattgcttatattttcatctatcatctccacacagtcaaatccgtggttagcatgcacctcatcaaccggtaaaagactatcggactcttctatcattataactctagaatatttaatttggtcattattaatcaagtcaattatcttatttttaacaaacgtgagtattttactcattttttataaaaacttttagaaatatacagactctatcgtgtgtctatatcttctttttatatccaatgtatttatgtctgatttttcttcatttatcatatataatggtccaaattctacacgtgcttcggattcatccagatcattaaggttcttataattgtaacatccttctcttccctcttctacatcttccttcttattcttattcttagcgtcacagaatctaccacagcaggatcccatgacgagcgtcatattaaactaatccattttcaattataatatatgattagtaatgaccattaaaataaaaaatattcttcataaccggcaagaaagtgaaaagttcacattgaaactatgtcagtagtatacatcatgaaatgatgatatatatatactctattttggtggaggattatatgatataattcgtggataatcatttttaagacacatttctttattcgtaaatcttttcacgttaaatgagtgtccatattttgcaatttcttcatatgatggcggtgtacgtggacgaggctgctcctgttcttgttgtggtcgccgactgtcgtgtctgcgtttagatccctccattatcgcgattgcgtagatggagtactattttataccttgtaattaaatttttttattaattaaacgtataaaaacgttccgtatctgtatttaagagccagatttcgtctaatagaacaaatagctacagtaaaaataactagaataattgctacacccactagaaaccacggatcgtaatacggcaatcggttttcgataataggtggaacgtatattttatttaaggacttaacaattgtctgtaaaccacaatttgcttccgcggatcctgtattaactatctgtaaaagcatatgttgaccgggcggagccgaacattctccgatatctaatttctgtatatctataatattattaacctccgcatacgcattacagttcttttctagcttggataccgcactaggtacatcgtctagatctattcctatttcctcagcgatagctcttctatccttttccggaagcaatgaaatcacttcaataaatgattcaaccatgagtgtgaaactaagtcgagaattactcatgcatttgttagttattcggagcgcgcaatttttaaactgtcctataacctctcctatatgaatagcacaagtgacattagtagggatagaatgttgagctaatttttgtaaataactatctataaaaagattatacaaagttttaaactctttagtttccgccatttatccagtctgagaaaatgtctctcataataaatttttccaagaaactaattgggtgaagaatggaaacctttaatctatatttatcacagtctgttttggtacacatgatgaattcttccaatgccgtactaaattcgatatctttttcgatttctggatatgtttttaataaagtatgaacaaagaaatggaaatcgtaataccagttatgtttaactttgaaattgttttttattttcttgttaatgattccagccacttgggaaaagtcaaagtcgtttaatgccgatttaatacgttcattaaaaacaaactttttatcctttagatgaattattattggttcattggaatcaaaaagtaagatattatcgggtttaagatctgcgtgtaaaaagttgtcgcaacagggtagttcgtagattttaatgtataacagagccatctgtaaaaagataaactttatgtattgtaccaaagatttaaatcctaatttgatagctaactcggtatctactttatctgccgaatacagtgctaggggaaaaattataatgtttcctctttcatattcgtagttagttctcttttcatgttcgaaaaagtgaaacatgcggttaaaatagtttataacattaatattactgttaataactgccggataaaagtgggatagtaatttcacgaatttgatactgtcctttctctcgttaaacgcctttaaaaaaactttagaagaatatctcaatgagagttcctgaccatccatagtttgtatcaataatagcaacatatgaagaacacgtttatacagagtatgtaaaaatgttaatttatagtttaatcccatggcccacgcacacacgattaattttttttcatctccctttagattgttgtatagaaatttgggtactgtgaactccgccgtagtttccatgggactatataattttgtggcctcgaatacaaattttactacatagttatctatcttaaagactataccatatcctcctgtagatatgtgataaaaatcgtcgtttataggataaaatcgtttatccttttgttggaaaaaggatgaattaatgtaatcattctcttctatctttagtagtgtttccttattaaaattcttaaaataatttaacaatctaactgacggagcccaattttggtgtaaatctaattgggacattatattgttaaaatacaaacagtctcctaatataacagtatctgataatctatggggagacatccattgatattcaggggatgaatcattggcaacacccatttattgtacaaaaagccccaatttacaaacgaaagtccaggtttgatagagacaaacaattaactattttgtctctgtttttaacacctccacagtttttaatttctttagtaatgaaattattcacaatatcagtatcttctttatctaccagagattttactaacttgataaccttggctgtctcattcaatagggtagtaatatttgtatgtgtgatattgatatctttttgaattgtttcttttagaagtgattctttgatggtgccagcatacgaattacaataatgcagaaactcggttaacatgcaggaattatagtaagccaattccaattgttgcctgtgttgtattagagtgtcaatatgagcaatggtgtccttgcgtttctctgatagaatgcgagcagcgattttggcgttatcatttgacgatatttctggaatgacgaatcctgtttctactaactttttggtaggacaaagtgaaacaatcaagaagatagcttctcctcctatttgtggaagaaattgaactcctctagatgatctactgacgatagtatctccttgacagatattggaccgaattacagaagtacctggaatgtaaagccctgaaaccccctcattttttaagcagattgttgccgtaaatcctgcactatgcccaagatagagagctcctttggtgaatccatctctatgtttcagtttaaccaagaaacagtcagctggtctaaaatttccatctctatctaatacagcatctaacttgatgtcaggaactatgaccggtttaatgttatatgtaacattgagtaaatccttaagttcataatcatcactgtcatcagttatgtacgatccaaacaatgtttctaccggcatagtggatacgaagatgctatccatcagaatgtttccctgattagtattttctatatagctattcttctttaaacgattttccaaatcagtaactatgttcatttttttaggagtaggacgcctagccagtatggaagaggattttctagatcctctcttcaacatctttgatctcgatggaatgcaaaaccccatagtgaaacaaccaacgataaaaataatattgtttttcactttttataattttaccatctgactcatggattcattaatatctttataagagctactaacgtataattctttataactgaactgagatatatacaccggatctatggtttccataattgagtaaatgaatgctcggcaataactaatggcaaatgtatagaacaacgaaattatactagagttgttaaagttaatattttctatgagctgttccaataaattatttgttgtgactgcgttcaagtcataaatcatcttgatactatccagtaaaccgtttttaagttctggaatattatcatcccattgtaaagcccctaattcgactatcgaatatcctgctctgatagcagtttcaatatcgacggacgtcaatactgtaataaaggtggtagtattgtcatcatcgtgataaactacgggaatatggtcgttagtaggtacggtaactttacacaacgcgatatataactttccttttgtaccatttttaacgtagttgggacgtcctgcagggtattgttttgaagaaatgatatcgagaacagatttgatacgatatttgttggattcctgattattcactataatataatctagacagatagatgattcgataaatagagaaggtatatcgttggtaggataatacatccccattccagtattctcggatactctattgatgacactagttaagaacatgtcttctattctagaaaacgaaaacatcctacatggactcattaaaacttctaacgctcctgattgtgtctcgaatgcctcgtacaaggatttcaaggatgccatagattctttgaccaacgatttagaattgcgtttagcatctgatttttttattaaatcgaatggtcggctctctggtttgctaccccaatgataacaatagtcttgtaaagataaaccgcaagaaaatttatacgcatccatccaaataaccctagcaccatcggatgatattaatgtattattatagattttccatccacaattattgggccagtatactgttagcaacggtatatcgaatagattactcatgtaacctactagaatgatagttcgtgtactagtcataatatctttaatccaatctaaaaaatttaaaattagattttttacactgttaaagttaacaaaagtattacccgggtacgtggatatcatatatggcattggtccattatcagtaatagctccataaactgatacggcgatggtttttatatgtgtttgatctaacgaggaagaaattcgcgcccacaattcatctctagatatgtatttaatatcaaacggtaacacatcaatttcgggacgcgtatatgtttctaaatttttaatccaaatataatgatgacctatatgccctattatcatactgtcaactatagtacacctagggaacttacgatacatctgtttcctataatcgttaaattttacaaatctataacatgctaaaccttttgacgacagccattcattaatttctgatatggaatctgtattctcgataccgtatcgttctaaagccagtgctatatctccctgttcgtgggaacgctttcgtataatatcgatcaacggataatctgaagtttttggagaataatatgactcatgatctatttcgtccataaacaatctagacataggaattggaggcgatgatcttaattttgtgcaatgagtcgtcaatcctataacttctaatcttgtaatattcatcatcgacataatactatctatgttatcatcgtatattagtataccatgaccttcttcatttcgtgccaaaatgatatacagtcttaaatagttacgcaatatctcaatagtttcataattgttagctgttttcatcaaggtttgtatcctgtttaacatgatggcgttctataacgtctctattttctatttttaattttttaaatttttaacgatttactgtggctagatacccaatctctctcaaatatttttttagcctcgcttacaagctgtttatctatactattaaaactgacgaatccgtgattttggtaatgggttccgtcgaaatttgccgaagtgatatgaacatattcgtcgtcgactatcaacaattttgtattattctgaatagtgaaaaccttcacagatagatcattttgaacacacaacgcatctagacttttggcggttgccatagaatatacgtcgttcttatcccaattaccaactagaagtctgatcttaactcctctattaatggctgcttctataatggagttgtaaatgtcgggccaatagtagctattaccgtcgacacgtgtagtgggaactatggccaaatgttcaatatctatactagtcttagctgacctgagtttatcaataactacatcggtatctagatctctagaatatcccaataggtgttccggagaatcagtaaagaacactccacctataggattcttaatatgatacgcagtgctaactggcaaacaacaagccgcagagcataaattcaaccatgaattttttgcgctattaaaggctttaaaagtatcaaatcttctacgaagatctgtggccagcgggggataatcagaatatacacctaacgttttaatcgtatgtatagatcctccagtaaatgacgcgtttcctacataacatctttcatcatctgacacccaaaaacaaccgagtagtagtcccacattattttttttatctatattaacggttataaaatttatatccgggcagtgactttgtagctctcccagatttcttttccctcgttcatctagcaaaactattattttaatccctttttcagatgcctcttttagtttatcaaaaataagcgctcccctagtcgtactcagaggattacaacaaaaagatgctatgtatatatatttcttagctagagtgataatttcgttaaaacattcaaatgttgttaaatgatcggatctaaaatccatattttctggtagtgtttctaccagcctacattttgctcccgcaggtaccgatgcaaatggccacatttagttaacataaaaacttatacatcctgttctatcaacgattctagaatatcatcggctatatcgctaaaattttcatcaaagtcgacatcacaacctaactcagtcaatatattaagaagttccatgatgtcatcttcgtctatttctatatccgtatccattgtagattgttgaccgattatcgagtttaaatcattactaatactcaatccttcagaatacaatctgtgtttcattgtaaatttataggcggtgtatttaagttggtagattttcaattatgtattaatatagcaacagtagttcttgctcctccttgattctagcatcctcttcattattttcttctacgtacataaacatgtccaatacgttagacaacacaccgacgatggcggccgcaggatcctgcgaagcttacagacacgaatatgactaaaccgatgaccatttaaaaacccctctctagctttcacttaaactgtatcgatcattcttttagcacatgtataatataaaaacattattctatttcgaatttaggcttccaaaaatttttcatccgtaaaccgataataatatatatagacttgttaatagtcggaataaatagattaatgcttaaactatcatcatctccacgattagagatacaatatttacattctttttgctgtttcgaaactttatcaatacacgttaatacaaacccaggaaggagatattgaaactgaggctgttgaaaatgaaacggtgaatacaataattcagataatgtaaaatcatgattccgtattctgatgatattagaactgctaatggatgtcgatggtatgtatctaggagtatctattttaacaaagcatcgatttgctaatatacaattatccttttgattaattgttattttattcatattcttaaaaggtttcatatttatcaattcttctacattaaaaatttccatttttaatttatgtagccccgcaatactcctcattacgtttcattttttgtctataatatccattttgttcatctcggtacatagattatccaattgagaagcgcatttagtagttttgtacattttaagtttattgacgaatcgtcgaaaactagttatagttaacattttattatttgataccctgatattaatacccctgccgttactattatttataactgatgtaatccacgtaacattggaattaactatcgatagtaatgcatcgacgcttccaaaattgtctattataaactcaccgataatttttttattgcatgttttcatattcattaggattatcaaatctttaatcttattacgattgtatgcgttgatattacaagacgtcattctaaaagacggaggatctccatcaaatgccagacaatcacgtacaaagtacatggaaataggttttgttctattgcgcatcatagatttatatagaacacccgtagaaatactaatttgttttactctataaaatactaatgcatctatttcatcgttttgtataacgtctttccaagtgtcaaattccaaatttttttcattgatagtaccaaattcttctatctctttaactacttgcatagataggtaattacagtgatgcctacatgccgttttttgaaactgaatagatgcgtctagaagcgatgctacgctagtcacaatcaccactttcatatttagaatatatatatgtaaaaatatagtagaatttcattttgtttttttctatgctataaatgaattctcattttgcatctgctcatactccgttttatattaataccaaagaaggaagatatctggttctaaaagccgttaaagtatgcgatgttagaactgtagaatgcgaaggaagtaaagcttcctgcgtactcaaagtagataaaccctcatcgcccgcgtgtgagagaagaccttcgtccccgtccagatgcgagagaatgaataaccctggaaaacaagttccgtttatgaggacggacatgctacaaaatatgttcgcggctaatcgcgataatgtagcttctagacttttgtcctaaaatactattatatccttttcgatattaataaatccgtgtcgtccaggttttttatctctttcagtatgtgaatagataggtattttatctctattcatcatcgaatttaagagatccgataaacattgtttgtattctccagatgtcagcatctgatacaacaatatatgtgcacataaacctctggcacttatttcatgtaccttccccttatcactaaggagaatagtatttgagaaatatgtatacatgatattatcatgaattagatatacagaatttgtaacactctcgaaatcacacgatgtgtcggcgttaagatctaatatatcactcgataacacattttcatctagatacactagacattttttaaagctaaaatagtctttagtagtaacagtaactatgcgattattttcatcgatgatacatttcatcggcatattattacgcttaccatcaaagactataccatgtgtatatctaacgtattctagcatggttgccatacgcgcattaaacttttcaggatctttggatagatcttccaatctatctatttgagaaaacatttttatcatgttcaatagttgaaacgtcggatccactatatagatattatctataaagattttaggaactacgttcatggtatcctggcgaatattaaaactatcaatgatatgattatcgttttcatcttttatcaccatatagtttctaagatatgggattttacttaatataatattatttcccgtgataaattttattagaaaggccaaatctataagaaaagtcctagaattagtctgaagaatatctatatcgccgtatagtatatttggattaattagatatagagaatatgatccgtaacatatacaacttttattatggcgtctaagatattcttccatcaacttattaacatttttgactagggaagatacattatgacgtcccattacttttgccttgtctattactgcgacgttcatagaatttagcatatctcttgccaattcttccattgatgttacattataagaaattttagatgaaattacatttggagctttaatagtaagaactcctaatatgtccgtgtatgtggtcactaatacagattgtagttctataatcgtaaataatttacctatattatatgtttgagtctgtttagaaaagtagctaagtatacgatcttttatttctgatgcagatgtattaacatcggaaaaaaatctttttttattcttttttactaaagatacaaatatgtctttgttaaaaacagttattttctgaatatttctagcttgtaattttaacatatgatattcgttcacactaggtactctgcctaaataggtttctataatctttaatgtaatattaggaaaagtattctgatcaggattcctattcattttgaggatttaaaactctgattattgtctaatatggtctctacgcaaactttttcacagagcgatagagtttttgataactcgtttttcttaagaaatataaaactactgtctccagagctcgctctatcttttattttatctaattcgatacaaactcctgatactggttcagaaagtaattcattaattttcagtcctttatagaagatatttaatatagataatacaaaatcttcagtttttgatatcgatctgattgatcctagaactagatatattaataacgtgctcattaggcagtttatggcagcttgataattagatatagtatattccagttcatatttattagataccgcattgcccagattttgatattctatgaattcctctgaaaataaatccaaaataactagacattctattttttgtggattagtgtactctcttccctctatcatgttcactactggtgtccacgatgataaatatctagagggaatataatatagtccataggatgccaatctagcaatgtcgaataactgtaattttattcttcgctcttcattatgaattgattcttgaggtataaacctaacacaaattatattattagacttttcgtatgtaatgtctttcatgttataagtttttaatcctggaatagaatctattttaatgaggcttttaaacgcagagttctccaacgagtcaaagcataatactctgttgtttttcttatatacgatgttacgattttcttctttgaatggaataggtttttgaattagtttataattacaacataatagataaggaagtgtgcaaatagtacgcggaaaaaacataatagctcccctgttttcatccatggttttaagtaaatgatcactggcttctttagtcaatggatattcgaacattaaccgtttcatcatcattggacagaatccatatttcttaatgtaaagagtgatcaaatcattgtgtttattgtaccatcttgttgtaaatgtgtattcggttatcggatctgctcctttttctattaaagtatcgatgtcaatctcgtctaagaattcaactatatcgacatatttcatttgtatacacataaccattactaacgtagaatgtataggaagagatgtaacgggaacagggtttgttgattcgcaaactattctaatacataattcttctgttaatacgtcttgcacgtaatctattatagatgccaagatatctatataattattttgtaagatgatgttaactatgtgatctatataagtagtgtaataattcatgtattttgatatatgttccaactctgtctttgtgatgtctagtttcgtaatatctatagcatcctcaaaaaatatattcgcatatattcccaagtcttcagttctatcttctaaaaaatcttcaacgtatggaatataataatctattttacctcttctgatatcattaatgatatagtttttgacactatcttctgtcaattgattcttattcactatatctaagaaacggatagcgtccctaggacgaactactgccattaatatctctattatagcttctggacataattcatctattataccagaattaatgggaactattccgtatctatctaacatagttttaagaaagtcagaatctaagacttgatgttcatatattggttcatacatgaaatgatctctattgatgatagtgactatttcattctctgaaaattggtaactcattctatatatgctttccttgttgatgaaggatagaatatactcaatagaatttgtaccaacaaactgttctcttatgaatcgtatatcatcatctgaaataatcatgtaaggcatacatttaacaattagagacttgtctcctgttatcaatatactattcttgtgataatttatgtgtgaggcaaatttgtccacgttctttaattttgttatagtagatatcaaatccaatggagctacagttcttggcttaaacagatatagtttttctggaacaaattctacaacattattataaaggactttgggtagataagtgggatgaaatcctattttaattaatgcgatagccttgtcctcgtgcagatatccaaacgcttttgtgatagtatggcattcattgtctagaaacgctctacgaatatctgtgacagatatcatctttagagaatatactagtcgcgttaatagtactacaatttgtattttttaatctatctcaataaaaaaattaatatgtatgattcaatgtataactaaactactaactgttattgataactagaatcagaatctaatgatgacgtaaccaagaagtttatctactgccaatttagctgcattatttttagcatctcgtttagattttccatcggccttatcgaatactcttccgtcgatgtctacacaggcataaaatgtaggagagttactaggcccaactgattcaatacgaaaagaccaatctctcctagtaatttggcagtactcattaataacggtgacagggttagcatctttccaatcaataatttttttagccggaataacatcatcaaaagacttatgatcctctctcattgatttttcgcgggatacatcatctattatgacgtcagccatagcatcagcatccggcttatccgcctccgttgtcataaaccaacgaggaggaatatcgtcggagctgtacaccatagcactacgttgaagatcgtacagagctttattaacttctcgcttctccatattaagttgtctagttagttgtgcagcagtagctccttcgattccaatgtttttaatagccgcacacacaatctctgcgtcagaacgctcgtcaatatagatcttagacatttttagagagaactaacgcaaccagcaataaaactgaacctactttatcatttttttattcatcatcctctggtggttcgtcgttcctatcaaatgtagctctgattaacccgtcatctataggtgatgctggttctggagattctggaggagatggattattatctggaagaatctctgttatttccttgttttcatgtatcgattgcgttgtaacattaagattgcgaaatgctctaaatttgggaggcttaaagtgttgtttgcaatctctacacgcgtgtctaactagtggaggttcgtcagctgctctagtttgaatcatcatcggcgtagtattcctacttttacagttaggacacggtgtattgtatttctcgtcgagaacgttaaaataatcgttgtaactcacatcctttattttatctatattgtattctactcctttcttaatgcattttataccgaataagagatagcgaaggaattctttttcggtgccgctagtacccttaatcatatcacatagtgttttatattccaaatttgtggcaatagacggtttatttctatacgatagtttgtttctggaatcctttgagtattctataccaatattattctttgattcgaatttagtttcttcgatattagattttgtattacctatattcttgatgtagtactttgatgatttttccatggcccattctattaagtcttccaagttggcatcatccacatattgtgatagtaattctcggatatcagtagcggctaccgccattgatgtttgttcattggatgagtaactactaatgtatacattttccatttataacacttatgtattaactttgttcatttatattttttcattattatgttgatattaacaaaagtgaatatatatatgttaataattgtattgtggttatacggctacaattttataatgagtgaaagtcagtgtccgatgatcaatgacgatagctttactctgaaaagaaagtatcaaatcgatagtgcggagtcaacaataaaaatggataagaagaggataaagtttcagaatagagccaaaatggtaaaagaaataaatcagacaataagagcagcacaaactcattacgagacattgaaactaggatacataaaatttaagagaatgattatgactactactctagaagatatagcaccatctattccaaataatcagaaaacttataaactattctcggacatttcagccatcggcaaagcatcacagaatccgagtaagatggtatatgctctgctgctttacatgtttcccaatttgtttggagatgatcatagattcattcgttatagaatgcatccaatgagtaaaatcaaacacaagatcttctctcctttcaaacttaatcttattagaatattagtggaagaaagattctataataatgaatgcagatctaataaatggagaataattggaacacaagttgataaaatgttgatagctgaatctgataaatatacaatagatgcaaggtataacctaaaacccatgtatagaatcaagggagaatctgaagaagataccctctttatcaaacagatggtagaacaatgtgtgacatcccaggaattggtggaaaaagtgttgaagatactgtttagagatttgttcaagagtggagaatacaaagcgtacagatacgatgatgatgtagaaaatggatttattggattggatacactaaaattaaacattgttcatgatatagttgaaccatgtatgcctgttcgtaggccagtggctaagatactgtgtaaagaaatggtaaataaatactttgagaatccgctacatattattggtaaaaatcttcaagagtgcattgactttgttagtgaataggcatttcatctttctccaatactaattcaaattgttaaattaataatggatagtataaatagttattagttataagatagtaaaaataattattagaataagagtgtagtatcatagataactctcttctataaaaatggattttattcgtagaaagtatcttatatacacagtagaaaataatatagattttttaaaggatgatacattaagtaaagtaaacaattttaccctcaatcatgtactagctctcaagtatctagttagcaattttcctcaacacgttattactaaggatgtattagctaataccaatttttttgttttcatacatatggtacgatgttgtaaagtgtacgaagcggttttacgacacgcatttgatgcacccacgttgtacgttaaagcattgactaagaattatttatcgtttagtaacgcaatacaatcgtacaaggaaaccgtgcataaactaacacaagatgaaaaatttttagaggttgccgaatacatggacgaattaggagaacttataggcgtaaattatgacttagttcttaatccattatttcacggaggggaacccatcaaagatatggaaatcatttttttaaaactgtttaagaaaacagacttcaaagttgttaaaaaattaagtgttataagattacttatttgggcatacctaagcaagaaagatacaggcatagagtttgcggataatgatagacaaaatatatacactctatttcaacaaactggtagaatcgtccatagcaatctaacagaaacgtttagagattatatctttcccggagataagactagctattgggtgtggttaaacgaaagtatagctaatgatgcggatatcgttcttaatagacacgccattaccatgtatgataaaattcttagttatatatactctgagataaaacaaggacgcgttaataaaaacatgcttaagttagtttatatctttgagcctgaaaaagatatcagagaacttctgctagaaatcatatatgatattcctggagatatcctatctattattgatgcaaaaaacgacgattggaaaaaatattttattagtttttataaagctaattttattaacggtaatacatttattagtgatagaacgtttaacgaggacttattcagagttgttgttcaaatagatcccgaatatttcgataatgaacgaattatgtctttattctctacgagtgctgcggacattaaacgatttgatgagttagatattaataacagttatatatctaatataatttatgaggtgaacgatatcacattagatacaatggatgatatgaagaagtgtcaaatctttaacgaggatacgtcgtattatgttaaggaatacaatacatacctgtttttgcacgagtcggatcccatggtcatagagaacggaatactaaagaaactgtcatctataaaatccaagagtagacggctgaacttgtttagcaaaaacattttaaaatattatttagacggacaattggctcgtctaggtcttgtgttagatgattataaaggagacttgttagttaaaatgataaaccatcttaagtctgtggaggatgtatccgcattcgttcgattttctacagataaaaaccctagtattcttccatcgctaatcaaaactattttagctagttataatatttccatcatcgtcttatttcaaaggtttttgagagataatctatatcatgtagaagaattcttggataaaagcatccatctaaccaagacggataagaaatatatacttcaattgataagacacggtagatcatagaacagaccaaatatattattaataatttgtatatacatagatataattatcacacatttttgataaatgggaactgctgcaacaattcagactcccaccaaattaatgaataaagaaaatgcagaaatgattttggaaaaaattgttgatcatatagttatgtatattagtgacgaatcaagtgattcagaaaataatcctgaatatattgattttcgtaacagatacgaagactatagatctctcattataaaaagtgatcacgagtttgtaaagctatgtaaaaatcatgcggagaaaagttctccagaaacgcaacaaatgattatcaaacacatatacgaacaatatcttattccagtatctgaagtactattaaaacctataatgtccatgggtgacataattacatataacggatgtaaagacaatgaatggatgctagaacaactctctaccctaaactttaacaatctccgcacatggaactcatgtagcataggcaatgtaacgcgtctgttttatacattttttagttatctgatgaaagataaactaaatatataagtataatcccattctaatactttaacctgatgtattagcatcttattagaatattaacctaactaaaagacataacataaaaactcattacatagttgataaaaagcggtaggatataaatattatggctgccaccgttccgcgttttgacgacgtgtacaaaaatgcacaaagaagaattctagatcaagaaacattttttagtagaggtctaagtagaccgttaatgaaaaacacatatctatttgataattacgcgtatggatggataccagaaactgcaatttggagtagtagatacgcaaacctagatgctagtgactattatcccatttcgttgggattacttaaaaagttcgagtttctcatgtctctatataaaggtcctattcccgtatatgaagaaaaagtaaatactgaattcatagccaatggatcgttctctggtagatacgtatcatatcttcgaaagttttctgcccttccaacaaacgagtttattagttttttgttactgacttccattccaatctataatatcttgttctggtttaaaaacacacagtttgatattactaaacacacattattcagatacgtctatacagataatgccaaacacctggcgttggctaggtatatgcatcaaacaggagactataagcctttgtttagtcgtctcaaagagaattatatatttaccggtcccgttccaataagtatcaaagatatagatcaccctaatcttagtagagcaagaagtccatccgattatgagacattagctaatattagtactatattgtactttaccaagtatgatccggtattaatgtttttattgttttacgtacctgggtattcaattactacaaaaattactccagccgtagaatatctaatggataaactgaatctaacaaagagcgacgtacaactgttgtaaattattttatgcttcgtaaaatgtaggttttgaaccaaacattctttcaaagaatgagatgcataaaactttattatccaatagattgactatttcggacgtcaatcgtttaaagtaaacttcgtaaaatattctttgatcactgccgagtttaaaacttctatcgataattgtctcatatgttttaatatttacaagttttttggtccatggtacattagccggacaaatatatgcaaaataatatcgttctccaagttctatagtttctggattatttttattatattcagtaactaaatacatattagggttatctgcggatttataatttgagtgatgcattctactcaacataaataattctagaggagacgatctactatcaaattcggatcgtaaatctgtttctaaagaacggagaatatctatacatacctgattagaattcatccgtccttcagacaacatctcagacagtctggttttgtacatcttaatcatattcttatgaaacttggaaacatctcttctagtttcactagtacctttattaattctctcaggtacagattttgaattcgacgatgctgagtatttcatcgttgtatatttcttcttcgattgcataatcagattcttatataccgcctcaaactctattttaaaattattaaacaatactctattattaatcagtcgttctaactctttcgctatttctatagacttatctacatcttgactgtctatctctgtaaacacggagtcggtatctccatacacgctacgaaaacgaaatctgtaatctataggcaacgatgttttcacaatcggattaatatctctatcgtccatataaaatggattacttaatggattggcaaaccgtaacataccgttagataactctgctccatttagtaccgattctagatacaagatcattctacgtcctatggatgtgcaactcttagccgaagcgtatgagtatagagcactatttctaaatcccatcagaccatatactgagttggctactatcttgtacgtatattgcatggaatcatagatggccttttcagttgaactggtagcctgttttagcatctttttatatctggctctctctgccaaaaatgttcttaatagtctaggaatggttccttctatcgatctatcgaaaattgctatttcagagatgaggttcggtagtctaggttcacaatgaaccgtaatatatctaggaggtggatatttctgaagcaatagctgattatttatttcttcttccaatctattggtactaacaacgacaccgactaatgtttccggagatagatttccaaagatacacacattaggatacagactgttataatcaaagattaatacattattactaaacattttttgttttggagcaaataccttaccgccttcataaggaaacttttgttttgtttctgatctaactaagatagttttagtttccaacaatagctttaacagtggacccttgatgactgtactcgctctatattcgaataccatggattgaggaagcacatatgttgacgcacccgcgtctgtttttgtttctactccataatactcccacaaatactgacacaaacaagcatcatgaatacagtatctagccatatctaaagctatgtttagattataatccttatacatctgagctaaatcaacgtcatcctttccgaaagataatttatatgtatcattaggtaaagtaggacataatagtacgactttaaatccattttcccaaatatctttacgaattactttacatataatatcctcatcaacagtcacataattacctgtggttaaaacctttgcaaatgcagcggctttgcctttcgcgtctgtagtatcgtcaccgatgaacgtcatttctctaactcctctatttaatactttacccatgcaactgaacgcgttcttggatatagaatccaatttgtacgaatccaatttttcaaatttttgaatgaatgaatatagatcgaaaaatatagttccattattgttattaacgtgaaacgtagtattggccatgccgcctactcccttatgactagactgatttctctcataaatacagagatgtacagcttcctttttgtccggagatctaaagataattttctctcctgttaataactctagacgattagtaatatatctcagatcaaagttatgtccgttaaaggtaacgacgtagtcgaacgttagttccaacaattgtttagctattcgtaacaaaactatttcagaacatagaactagttctcgttcgtaatccatttccattagtgactgtatcctcaaacatcctctatcgacggcttcttgtatttcctgttccgttaacatctcttcattaatgagcgtaaacaataatcgtttaccacttaaatcgatataacagtaacttgtatgcgagattgggttaataaatacagaaggaaacttcttatcgaagtgacactctatatctagaaataagtacgatcttgggatatcgaatctaggtatttttttagcgaaacagttacgtggatcgtcacaatgataacatccattgttaatctttgtcaaatattgctcgtccaacgagtaacatccgtctggagatatcccgttagaaatataaaaccaactaatattgagaaattcatccatggtggcattttgtatgctgcgtttctttggctcttctatcaaccacatatctgcgacggagcattttctatctttaatatctagattataacttattgtctcgtcaatgtctatagttctcatctttcccaacggcctcgcattaaatggaggaggagacaatgactgatatatttcgtccgtcactacgtaataaaagtaatgaggaaatcgtataaatacggtctcgccatttcgacatctggatttcagatataaaaatctgttttcaccgtgactttcaaaccaattaatgcaccgaacatccatttatagaatttagaaatatattttcatttaaatgaatcccaaacattggggaagagccgtatggaccattatttttatagtactttcgcaagcgggtttagacggcaacatagaagcgtgtaaacgaaaactatatactatagttagcactcttccatgtcctgcatgtagacggcacgcgactatcgctatagaggacaataatgtcatgtctagcgatgatctgaattatatttattattttttcatcagattatttaacaatttggcatctgatcccaaatacgcgatcgatgtgacaaaggttaaccctttataaacttaacccattataaaacttatgattagtcacaactgaaataaccgcgtgattattttttggtataattctacacggcatggtttctgtgactatgaattcaacccccgttacattagtgaaatctttaacaaacagcaagggttcgtcaaagacataaaactcattgtttacaatcgaaatagaccccctatcacacttaaaataaaaaatatccttatcctttaccaccaaataaaattctgattggtcaatgtgaatgtattcacttaacagttccacaaatttatttattaactccgaggcacatacatcgtcggtattttttatggcaaactttactcttccagcatccgtttctaaaaaaatattaacgagttccatttatatcatccaatattattgaaatgacgttgatggacagatgatacaaataagaaggtacggtacctttgtccaccatctcctccaattcatgctctattttgtcattaactttaatgtatgaaaacagtacgccacatgcttccatgacagtgtgtaacactttggatacaaaatgtttgacattagtataattgtccaagactgtcaatctataatagatagtagctataatatattctatgatggtattgaagaagatgacaaccttggcatattgatcatttaacacagacatggtatcaacagatagcttgaatgaaagagaatcagtaattggaataagcgtcttctcgatagagtgtccgtataccaacatgtctgatattttgatgtattccattaaattatttagttttttctttttattctcgttaaacagcatttctgtcaacggaccccaacatcgttgaccgattaagttttgattgatttttccgtgtaaggcgtatctagtcagatcgtatagcctatccaataatccatcgtctgtgtgtagatcacatcgtacactttttaattctctatagaagagcgacagacatctggagcaattacagacagcaatttctttattctctacagatgtaagatacttgaagacattcctatgatgatgcagaattttggataacacggtattgatggtatctgttaccataattcctttgatggctgatagtgtcagagcacaagatttccaatctttgacaatttttagcaccattatctttgttttgatatctatatcagacagcatggtgcgtctgacaacacagggattaagacggaaagatgaaatgattctctcaacatcttcaatagataccttgctattttttctggcattatctatatgtgcgagaatatcctctagagaatcagtatcctttttgatgatagtggatctcaatgacatgggacgtttaaaccttcttattctatcaccagattgcatggtgatttgtcttctttcttttatcataatgtaatctctaaattcatcggcaaattgtctatatctaaaatcataatatgagatgtttacctctacaaatatctgttcgtccaatgttagagtatttacatcagttttgtattccaaattaaacatggcaacggatttaattttatattcctctattaagtcctcgtcgataataacagaatgtagataatcatttaatccgtcgtacatggttggaagatgcttgttgacaaaatctttaattgtcttgatgaaggtgggactatatctaacatcttgattaataaaatttataacattgtccataggatactttgtaactagttttatacacatctcttcatcggtaagtttagacagaatatcgtgaacaggtggtatattatattcatcagatatacgaagaacaatgtccaaatctatattgtttaatatattatatagatgtagcgtagctcctacaggaatatctttaactaagtcaatgatttcatcaaccgttagatctattttaaagttaatcatataggcattgatttttaaaaggtatgtagccttgactacattctcattaattaaccattccaagtcattgtgtgtaagaagattatattctatcataagcttgactacatttggtcccgataccattaaagaattcttatgatataaggaaacagattttaggtactcatctactctacaagaattttggagagccttaacgatatcagtgacgtttattatttcaggaggaaagaatctaacattgagaatatcggaattaatagcttccagatacagtgattttggcaatagtccgtgtaatccataatccagtaacacgagctggtgcttgctagacaccttttcaatgtttaatttttttgaaataagctttgataaagccttcctcgcaaattccggatacatgaacatgtcggcgacatgattaagtattgttttttcattatttttatattttctcaacaagttctcaataccccaatagatgatagaatatcacccaatgcgtccatgttgtctatttccaacaggtcgctatatccaccaatagaagtttttccaaaaaagattctaggaacagttctaccaccagtaatttgttcaaaataatcccgcaattcattttcgggtttaaattctttaatatcgacaatttcatacgctcctcttttgaaactaaacttatttagaatatccagtgcatttctacaaaaaggacatgtatacttgacaaaaattgtcactttgttattggccaacctttgttgtacaaattcctcggccattttaatatttaagtgatataaaactatctcgacttatttaactctttagtcgagatatatggacgcagatagctatatgatagccaactacagaaggcaaacgctataaaaaacataattacgacgagcatatttataaatatttttattcagcattacttgatatagtaatattaggcacagtcaaacattcaaccactctcgatacattaactctctcattttctttaacaaattctgcaatatcttcgtaaaaagattcttgaaactttttagaatatctatcgactctagatgaaatagcgttcgtcaacatactatgttttgtatacataaaggcgcccattttaacagtttctagtgacaaaatgctagcgatcctaggatcctttagaatcacatagattgacgattcgtctctcttagtaactctagtaaaataatcatacaatctagtacgcgaaataatattatccttgacttgaggagatctaaacaatctagttttgagaacatcgataagttcatcgggaatgacatacatactatctttaatagaactcttttcatccagttgaatggattcgtccttaaccaactgattaatgagatcttctattttatcattttccagatgatatgtatgtccattaaagttaaattgtgtagcgcttctttttagtctagcagccaatactttaacatcactaatatcgatatacaaaggagatgatttatctatggcattaagaattcgtttttcgacatccgtcaaaaccaattcctttttgcctgtatcatccagttttccatcctttgtaaagaaattattttctactagactattaataagactgataaggattcctccataattgcacaatccaaactttttaacaaaactagactttacgagatctacaggaatgcgtacttcaggttttttagcttgtgattttttcttttgcggacattttctagtaaccaactcatctaccatttcattgattttagcagtgaaataagctttcaatgcacgggcactgatactattgaaaacgagttgatcttcaaattccgccatttaagttcaccaaacaacttttaaatacaaatatatcaatagtagtagaataagaactataaaaaaaataataattaaccaaccccaacaaccggtattattagttgatgtggtagttttctcatcacttagaacagatttaacaatttctataaagtctgtcaaatcatcttccggagaccccataaatacaccaaatatagcggcgtacaacttatccatttatacattgaatattggcttttctttatcgctatcttcatcatattcatcatcaatatcaacaagtcccagattacgagccagatcttcttctacattttcagtcattgatacacgttcactatctccagagagtccgataacgttagccaccacttctctatcaatgattagtttcttgagcgcgaaagtaatttttgtttccgttccggatctatagaagacgataggtgtgataattgccttggccaattgtctttctcttttactgagtgattctagttcaccttctatagatctgagaatggatgattctccagtcgaaacatattctaccatggatccgtttaatttgttgatgaagatggattcatccttaaatgttttctctgtaatagtttccaccgaaagactatgcaaagaatttggaatgcgttccttgtgcttaatgtttccatagacggcttctagaagttgatacaacataggactagccgcggtaacttttatttttagaaagtatccatcgcttctatcttgtttagatttatttttataaagtttagtctctccttccaacataataaaagtggaagtcatttgactagataaactatcagtaagttttatagagatagacgaacaattagcgtattgagaagcatttagtgtaacgtattcgatacattttgcattagatttactaatcgattttgcatactctataacacccgcacaagtctgtagagaatcgctagatgcagtaggtcttggtgaagtttcaactctcttcttgattaccttactcatgattaaacctaaataattgtactttgtaatataatgatatatattttcactttatctcatttgagaataaaaatgtttttgtttaaccactgcatgatgtacagatttcggaatcgcaaaccaccagtggttttattttatccttgtccaatgtgaattgaatgggagcggatgcgggtttcgtacgtagatagtacattcccgtttttagaccgagactccatccgtaaaaatgcatactcgttagtttggaataactcggatctgctatatggatattcatagattgactttgatcgatgaaggctcccctgtctgcagccatttttatgatcgtcttttgtggaatttcccaaatagttttataaactcgcttaatatcttctggaaggtttgtattctgaatggatccaccatctgccataatcctattcttgatctcatcattccataattttctctcggttaaaactctaaggagatgcggattaactacttgaaattctccagacaatactctccgagtgtaaatattactggtatacggttccaccgactcattatttcccaaaatttgagcagttgatgcagtcggcataggtgccaccaataaactatttctaagaccgtatgttctgattttatcttttagaggttcccaattccaaagatccgacggtacaacattccaaagatcatattgtagaataccgttactggcgtacgatcctacatatgtatcgtatggtccttccttctcagctagttcacaactcgcctctaatgcaccgtaataaatggtttcgaagatcttcttatttagatcttgtgcttccaggctatcaaatggataatttaagagaataaacgcgtccgctaatccttgaacaccaataccgataggtctatgtctcttattagagatttcagcttctggaataggataataattaatatctataattttattgagatttctgacaattactttgaccacatccttcagtttgagaaaatcaaatcgcccatctattacaaacatgttcaaggcaacagatgccagattacaaacggctacctcattagcatccgcatattgtattatctcagtgcaaagattactacacttgatagttcctaaattttgttgattactctttttgttacacgcatccttataaagaatgaatggagtaccagtttcaatctgagattctataatcgctttccagacgactcgagcctttattatagatttgtatctcctttctctttcgtatagtgtatacaatcgttcgaactcgtctccccaaacattgtccaatccaggacattcatccggacacatcaacgaccactctccgtcatccttcactcgtttcataaagagatcaggaatccaaagagctataaatagatctctggttctatgttcctcgtttcctgtattctttttaagatcgaggaacgccataatatcagaatgccacggttccaagtatatggccataactccaggccgtttgtttcctccctgatctatgtatctagcggtgttattataaactctcaacattggaataataccgtttgatataccattggtaccggagatatagcttccactggcacgaatattactaattgatagacctattccccctgccattttagagattaatgcgcatcgttttaacgtgtcatagataccctctatgctatcatcgatcatgttaagtagaaaacagctagacatttggtgacgactagttcccgcattaaataaggtaggagaagcgtgcgtaaaccatttttcagaaagtagattgtacgtctcaatagctgagtctatatcccattgatgaattcctactgcgacacgcattaacatgtgctgaggtctttcaacgatcttgttgtttattttcaacaagtaggatttttccaaagttttaaaaccaaaatagttgtatgaaaagtctcgttcgtaaataataaccgagttgagtttatccttatatttgttaactatatccatggtgatacttgaaataatcggagaatgtttcccatttttaggattaacatagttgaataaatcctccatcacttcactaaatagtttttttgtttccttgtgtagatttgatacggctattctggcggctagaatggcataatccggatgttgtgtagtacaagtggctgctatttcggctgccagagtgtccaattctaccgttgttactccattatatattccttgaataaccttcatagctattttaataggatctatatgatccgtgtttaagccataacataattttctaatacgagacgtgattttatcaaacatgacattttccttgtatccatttcgtttaatgacaaacatttttgttggtgtaataaaaaaattatttaacttttcattaatagggatttgacgtatgtagcgtacaaaatgattgttcctggtatatagataaagagtcctatatatttgaaaatcgttacggctcgattaaactttaatgattgcatagtgaatatatcattaggatttaactccttgactatcatggcggcgccagaaattaccatcaaaagcattaatacagttataccgatcgcagttagaacggttatagcatccaccatttatatctaaaaattagatcaaagaatatgtgacaaagtcctagttgtatactgagaattgacgaaacaatgtttcttacatatttttttcttattagtaaccgacttaatagtaggaactggaaaactagacttgattattctataagtatagatacccttccaaataatattctctttgataaaagttccagaaaatgtagaattttttaaaaagttatcttttgctattaccaagattgtgtttagacgcttattattaatatgagtgatgaaatccacaccgcctctagatatcgcctttatttccacattagatggtaaatccaatagtgaaactatctttttaggaatgtatggactcgcgtttagaggagtaaacgtcttaggcgtcggaaaggatgattcatcaaacgaataaacaatttcacaaatggatgttaatgtattagtaggaaattttttgacgctattggaattgaagattctaatggatgatgttctacctatttcatccgataacatgttaatttccgacaccaacggttttaatatttcgatgatatacggtagtctctctttcggacttatatagcttattccacaatacgagtcattatatactccaaaaaacaaaataactagtataaaatctgtatcgaatgggaaaaacgaaattatcgacataggtatagaatccggaacattgaacgtattaatacttaattctttttctgtggtaagtaccgataggttattgacattgtatggttttaaatattctataacttgagacttgatagatattagtgatgaattgaaaattatttttatcaccacgtgtgtttcaggatcatcgtcgacgcccgtcaaccaaccgaacggagtaaaataaatatcattaatatatgctctagatattagtatttttatcaatcctttgattatcatcttctcgtaggcgaatgattccatgatcaagagtgatttaagaacatcctccggagtattaatgggcttagtaaacagtccatcgttgcaataataaaagttatccaagttaaaggatattatgcattcgtttaaagatatcacctcatctgacggagacaattttttggtaggttttagagactttgaagctacttgtttaacaaagttattcatcgtcgtctactattctatttaattttgtagttaatttatcacatatcacattaattgactttttggtccacttttccatacgtttatattcttttaatcctgcgttatccgtttccgttatatccagggatagatcttgcaagttaaatagaatgctcttaaataatgtcattttcttatccgctaaaaatttaaagaatgtataaacctttttcagagatttgaaactcttaggtggtgtcctagtacacaatatcataaacaaactaataaacattccacattcagattccaacagctgattaacttccacattaatacagcctattttcgctccaaatgtacattcgaaaaatctgaataaaacatcgatgtcacaatttgtattatccaatacagaatgtttgtgattcgtgttaaaaccatcggagaaggaatagaaataaaaattattatagtggtggaattcagttggaatattgcctccggagtcataaaaggatactaaacattgttttttatcataaattacacatttccaatgagacaaataacaaaatccaaacattacaaatctagaggtagaacttttaattttgtctttaagtatatacgataagatatgtttattcataaacgcgtcaaatttttcatgaatcgctaaggagtttaagaatctcatgtcaaattgtcctatataatccacttcggatccataagcaaactgagagactaagttcttaatacttcgattgctcatccaggctcctctctcaggctctattttcatcttgacgacctttggattttcaccagtatgtattcctttacgtgataaatcatcgattttcaaatccatttgtgagaagtctatcgccttagatactttttcccgtagtcgaggtttaaaaaaatacgctaacggtatactagtaggtaactcaaagacatcatatatagaatggtaacgcgtctttaactcgtcggttaactctttcttttgatcgagttcgtcgctactattgggtctgctcaggtgccccgactctactagttccaacatcataccgataggaatacaagacactttgccggcggttgtagatttatcatatttttccactacatatccgttacaatttgttaaaaatttagatacatctatattgctacataatccagctagtgaatatatatgacataataaattggtaaatcctagttctggtattttactaattactaaatctgtatatctttccatttatcatggaaaagaatttaccagatatcttcttttttccaaactgcgttaatgtattctcttacaaatattcacaagatgaattcagtaatatgagtaaaacggaacgtgatagtttctcattggccgtgtttccagttataaaacatagatggcataacgcacacgttgtaaaacataaaggaatatacaaagttagtacagaagcacgtggaaaaaaagtatctcctccatcactaggaaaacccgcacacataaacctaaccgcgaagcaatatatatacagtgaacacacaataagctttgaatgttatagttttctaaaatgtataacaaatacagaaatcaattcgttcgatgagtatatattaagaggactattagaagctggtaatagtttacagatattttccaattccgtaggtaaacgaacagatactataggtgtactagggaataagtatccatttagcaaaattccattggcctcattaactcctaaagcacaacgagagatattttcagcgtggatttctcatagacctgtagttttaactggaggaactggagtgggtaagacgtcacaggtacccaagttattgctttggtttaattatttatttggtggattctctactctagataaaatcactgactttcacgaaagaccagtcattctatctcttcctaggatagctttagttagattgcatagcaataccattttaaaatcattgggatttaaggtactagatggatctcctatttctttacggtacggatctataccggaagaattaataaacaaacaaccaaaaaaatatggaattgtattttctacccataagttatctctaacaaaactatttagttatggcactcttattatagacgaagttcatgagcatgatcaaataggagatattattatagcagtagcgagaaagcatcatacgaaaatagattctatgtttttaatgactgccacgttagaggatgacagggaacggctaaaagtatttttacctaatcccgcatttatacatattcctggagatacactgtttaaaattagcgaggtatttattcataataagataaatccatcttccagaatggcatacatagaagaagaaaagagaaatttagttactgctatacagatgtatactcctcctgatggatcatccggtatagtctttgtggcatccgttgcacagtgtcacgaatataaatcatatttagaaaaaagattaccgtatgatatgtatattattcatggtaaggtcttagatatagacgaaatattagaaaaagtgtattcatcacctaatgtatcgataattatttctactccttatttggaatccagcgttactatacgcaatgttacacacatttatgatatgggtagagtttttgtccccgctccttttggaggatcgcaacaatttatttctaaatctatgagagatcaacgaaaaggaagagtaggaagagttaatcctggtacatacgtctatttctatgatctgtcttatatgaagtctatacagcgaatagattcagaatttctacataattatatattgtacgctaataagtttaatctaacactccccgaagatttgtttataatccctacaaatttggatattctatggcgtacaaaggaatatatagactcgttcgatattagtacagaaacatggaataaattattatccaattattatatgaagatgatagagtatgctaaactttatgtactaagtcctattctcgctgaggagttggataactttgagaggacgggagaattaactagtattgtacgagaagccattttatctctaaatttacaaattaagattttaaattttaaacataaagatgatgatacgtatatacacttttgtaaaatattattcggtgtctataacggaacaaacgctactatatattatcatagacctctaacgggatatatgaatatgatttcagatactatatttgttcctgtagataataactaaaaatcaaactctaatgaccacatctttttttagagatgaaaaattttccacatctccttttgtagacacgactaaacattttgcagaaaaaagtttattagtgtttagataatcgtatacttcatcagtgtagatagtaaatgtgaacagataaaaggtattcttgctcaatagattggtaaattccatagaatatattaatcctttcttcttgagatcccacatcatttcaaccagagacgttttatccaatgatttacctcgtactataccacatacaaaactagattttgcagtgacgtcgtacctggtattcctaccaaacaaaattttacttttagttcttttagaaaattctaaggtagaatctctatttgccaatatgtcatctatggaattaccactagcaaaaaatgatagaaatatatattgatacatcgcagctggttttgatctactatactttaaaaacgaatcagattccataattgcctgtatatcatcagctgaaaaactatgttttacacgtattccttcggcatttctttttaatgatatatcttgtttagacaatgataaagttatcatgtccatgagagacgcgtctccgtatcgtataaatatttcattagatgttagacgcttcattaggggtatacttctataaggtttcttaatcagtccatcattggttgcgtcaagaactactatcggatgttgttgggtatctctagtgttacacatggccttactaaagtttgggtaaataactatgatatctctattaattatagatgcatatatttcattcgtcaaggatattagtatcgacttgctatcgtcattaatacgtgtaatgtaatcatataaatcatgcgatagccaaggaaaatttaaatagatgttcatcatataatcgtcgctataattcatattaatacgttgacattgactaatttgtaatatagcctcgccacgaagaaagctctcgtattcagtttcatcgataaaggataccgttaaatataactggttgccgatagtctcatagtctattaagtggtaagtttcgtacaaatacagaatccctaaaatattatctaatgttggattaatctttaccataactgtataaaatggagacggagtcataactattttaccgtttgtacttactggaatagatgaaggaataatctccggacatgctggtaaagacccaaatgtctgtttgaagaaatccaatgttccaggtcctaatctcttaacaaaaattacgatattcgatcccgatatcctttgcattctatttaccagcatatcacgaactatattaagattatctatcatgtctattctcccaccgttatataaatcgcctccgctaagaaacgttagtatatccatacaatggaatacttcatttctaaaatagtattcgttttctaattctttaatgtgaaatcgtatactagaaagggaaaaattatctttgagttttccgttagaaaagaaccacgaaactaatgttctgattgcgtccgattccgttgctgaattaatggatttacaccaaaaactcatataacttctagatgtagaagcattcgctaaaaaattagtagaatcaaaggatataagtagatgttccaacaagtgagcaattcccaagatttcatctatatcattctcgaatccgaaattagaaattcccaagtagatatcctttttcatccgatcgttgatgaaaatacgaactttattcggtaagacaatcatttactaaggagtaaaataggaagtaatgttcgtatgtcgttatcatcgtataaattaaaggtgtgttttttaccattaagtgacattataattttaccaatattggaattataatataggtgtatttgcgcactcgcgacggttgatgcatcggtaaatatagctgtatctaatgttctagtcggtatttcatcatttcgctgtctaataatagcgttttctctatctgtttccattacagctgcctgaagtttattggtcggataatatgtaaaataataagaaatacatacgaataacaaaaataaaataagatataataaagatgccatttagagatctaattttgtttaacttgtccaaattcctacttacagaagatgaggaatcgttggagatagtgtcttccttatgtagaggatttgaaatatcttataatgacttgataacttactttccagataggaaataccataaatatatttataaagtatttgaacatgtagatttatcggaggaattaagtatggaattccatgatacaactctgagagatttagtctatcttagattgtacaagtattccaagtgtatacggccgtgttataaattaggagataatctaaaaggcatagttgttataaaggacaggaatatttatattagggaagcaaatgatgacttgatagaatatctcctcaaggaatacactcctcagatttatacatattctaatgagcgcgtccccataactggttcaaaattaattctttgtggattttctcaagttacatttatggcgtatacaacgtcgcatataacaacaaataaaaaggtagatgttctcgtttccaaaaaatgtatagatgaactagtcgatccaataaattatcaaatacttcaaaatttatttgataaaggaagcggaacaataaacaaaatactcaggaagatattttattcggtaacaggtggccaaactccataggtagctttttctatttcggattttagaatttccaaattcaccagcgatttatcggttttggtgaaatccaaggatttattaatgtccacaaatgccatttgttttgtctgtggattgtatttgaaaatggaaacgatgtagttagatagatgcgctgcgaagtttcctattagggttccgcgcttcacgtcacccagcatacttgaatcaccatcctttaaaaaaaatgataagatatcaacatggagtatatcatactcgaattttaattcttctactgactcactgacattttcacaaatactacaatacggtttaccgaaaataatcagtacgttcttcatttatgggtatcaaaaacttaaaatcgttactgctggaaaataaatcactgacgatattagatgataatttatacaaagtatacaatggaatatttgtggatacaatgagtatttatatagccgtcgccaattgtgtcagaaacttagaagagttaactacggtattcataaaatacgtaaacggatgggtaaaaaagggagggcatgtaaccctttttatcgatagaggaagtataaaaattaaacaagacgttagagacaagagacgtaaatattctaaattaaccaaggacagaaaaatgttagaattagaaaagtgtacatccgaaatacaaaatgttaccggatttatggaagaagaaataaaggcagaaatgcaattaaaaatcgataaactcacatttcaaatatatttatctgattctgataacataaaaatatcattgaatgagatactaacacatttcaacaataatgagaatgttacattattttattgtgatgaacgagacgcagaattcgttatgtgtctcgaggctaaaacacatttctctaccacaggagaatggccgttgataataagtaccgatcaggatactatgctatttgcatctgctgataatcatcctaagatgataaaaaacttaactcaactgtttaaatttgttccctcggcagaggataactatttagcaaaattaacggcgttagtgaatggatgtgatttctttcctggactctatggggcatctataacacccaccaacttaaacaaaatacaattgtttagtgattttacaatcgataatatagtcactagtttggcaattaaaaattattatagaaagactaactctaccgtagacgtgcgtaatattgttacgtttataaacgattacgctaatttagacgatgtctactcgtatattcctccttgtcaatgcactgttcaagaatttatattttccgcattagatgaaaaatggaatgaatttaaatcatcttatttagaaagcgtgccgttaccctgccaattaatgtacgcgttagaaccacgcaaggagattgatgtttcagaagttaaaactttatcatcttatatagatttcgaaaatactaaatcagatatcgatgttataaaatctatatcctcgatcttcggatattctaacgaaaactgtaacacgatagtattcggcatctataaggataatttactactgagtataaataattcattttactttaacgatagtctgttaataaccaatactaaaagtgataatataataaatataggttactagattaaaaatggtgttccaactcgtgtgctctacatgcggtaaagatatttctcacgaacgatataaattgattatacgaaaaaaatcattaaaggatgtactcgtcagtgtaaagaacgaatgttgtaggttaaaattatctacacaaatagaacctcaacgtaacttaacagtgcaacctctattggatataaactaatatggatccggttaattttatcaagacatatgcgcctagaggttctattatttttattaattataccatgtcattaacaagtcatttgaatccatcgatagaaaaacatgtgggtatttattatggtacgttattatcggaacacttggtagttgaatctacctatagaaaaggagttcgaatagtcccattggatagtttttttgaaggatatcttagtgcaaaagtatacatgttagagaatattcaagttatgaaaatagcagctgatacgtcattaactttattgggtattccgtatggatttggtcatgatagaatgtattgttttaaattggtagctgactgttataaaaatgccggtattgatacatcgtctaaacgaatattgggcaaagatatttttctgagccaaaacttcacagacgataatagatggataaagatatatgattctaataatttaacattttggcaaattgattaccttaaagggtgagttaatatgcataactactcctccgttgttttttccctcgttctttttcttaacgttgtttgccatcactctcataatgtaaagatattctaaaatggtaaacttttgcatatcggacgcagaaattggtataaatgttgtaattgtattatttcccgtcaatggactagtcacagctccatcagttttatatcctttagagtatttctcactcgtgtctaacattctagagcattccatgatctgtttatcgttgatattggccggaaagatagattttttattttttattatattactattggcaattgtagatataacttctggtaaatatttttctaccttttcaatctcttctattttcaagccggctatatattctgctatattgttgctagtatcaataccttttctggctaagaagtcatatgtggtattcactatatcagttttaactggtagttccattagcctttccacttctgcagaataatcagaaattggttctttaccagaaaatccagctactataataggctcaccgatgatcattggcaaaatcctatattgtaccagattaatgagagcatatttcatttccaataattctgctagttcttgagacattgatttatttgatgaatctagttggttctctagatactctaccatttctgccgcatacaataacttgttagataaaatcagggttatcaaagtgtttagcgtggctagaatagtgggcttgcatgtattaaagaatgcggtagtatgagtaaaccgttttaacgaattatatagtctccagaaatctgtggcgttacatacatgagccgaatgacatcgaagattgtccaatatttttaatagctgctctttgtccattatttctatatttgactcgcaacaattgtagataccattaatcaccgattcctttttcgatgccggacaatagcacaattgtttagctttggactctatgtattcagaattaatagatatatctctcaatacagattgcactatacattttgaaactatgtcaaaaattgtagaacgacgctgttctgcagccatttaactttaaataatttacaaaaatttaaaatgagcatccgtataaaaatcgataaactgcgccaaattgtggcatatttttcagagttcagtgaagaagtgtctataaatgtagactcgacggatgagttaatgtatatttttgccgccttgggcggatctgtaaacatttgggcaattatacctctaagtgcatcagtgttttaccgaggagccgaaaatattgtgtttaatcttcctgtgtccaaggtaaaatcgtgtttgtgtagttttcacaatgatgccatcatagatatagaacctgatctggaaaataatctagtaaaactttctagttatcatgtagtaagtgtcgattgtaacaaggaactgatgcctattaggacagatactactatttgtctaagtatagatcaaaagaaatcttacgtgtttaattttcacaagtatgaagaaaaatgttgtggtagaaccgtcattcatctagaatggttgttgggctttatcaagtgtattagtcagcatcagcatctggctattatgtttaaagatgacaatattattatgaagactcctggtaatactgatgcgttttccagggaatattctatgactgaatgttctcaagaactacaaaagttttctttcaaaatagctatctcgtctctcaacaaactacgaggattcaaaaagagagtcaatgtttttgaaactagaatcgtaatggataatgacgataacattttaggaatgttgttttcggatagagttcaatcctttaagatcaacatctttatggcgtttttagattaatactttcaatgagataaatatgggtggcggagtaagtgttgagctccctaaacgggatccgcctccgggagtacccactgatgagatgttattaaacgtggataaaatgcatgacgtgatagctcccgctaagcttttagaatatgtgcatataggaccactagcaaaagataaagaggataaagtaaagaaaagatatccagagtttagattagtcaacacaggacccggtggtctttcggcattgttaagacaatcgtataatggaaccgcacccaattgctgtcgcacttttaatcgtactcattattggaagaaggatggaaagatatcagataagtatgaagagggtgcagtattagaatcgtgttggccagacgttcacgacactggaaaatgcgatgttgatttattcgactggtgtcagggggatacgttcgatagaaacatatgccatcagtggatcggttcagcctttaataggagtaatagaactgtagagggtcaacaatcgttaataaatctgtataataagatgcaaacattatgtagtaaagatgctagtgtaccaatatgcgaatcatttttgcattatttacgcgcacacaatacagaagatagcaaagagatgatcgattatattctaagacaacagtctgcggactttaaacagaaatatatgagatgtagttatcccactagagataagttagaagagtcattaaaatatgcggaacctcgagaatgttgggatccagagtgttcgaatgccaatgttaatttcttactaacacgtaattataataatttaggactttgcaatattgtacgatgtaataccagcgtgaacaacttacagatggataaaacttcctcattaagattgtcatgtggattaagcaatagtgatagattttctactgttcccgtcaatagagcaaaagtagttcaacataatattaaacactcgttcgacctaaaattgcatttgatcagtttattatctctcttggtaatatggatactaattgtagctatttaaatgggtgccgcggcaagcatacagacgacggtgaatacactcagcgaacgtatctcgtctaaattagaacaagaagcgaacgctagtgctcaaacaaaatgtgatatagaaatcggaaatttttatatccgacaaaaccatggatgtaacctcactgttaaaaatatgtgctctgcggacgcggatgctcagttggatgctgtgttatcagccgctacagaaacatatagtggattaacaccggaacaaaaagcatacgtgccagctatgtttactgctgcgttaaacattcagacgagtgtaaacactgttgttagagattttgaaaattatgtgaaacagacttgtaattctagcgcggtcgtcgataacaaattaaagatacaaaacgtaatcatagatgaatgttacggagccccaggatctccaacaaatttggaatttattaatacaggatctagcaaaggaaattgtgccattaaagcgttgatgcaattgacgactaaggccactactcaaatagcacctagacaagttgctggtacaggagttcagttttatatgattgttatcggtgttataatattggcagcgttgtttatgtactatgccaagcgtatgttgttcacatccaccaatgataaaatcaaacttattttagccaataaggaaaacgtccattggactacttacatggacacattctttagaacttctccgatggttattgctaccacggatatgcaaaactgaaaatatattgataatattttaatagattaacatggaagttatcgctgatcgtctagacgatatagtgaaacaaaatatagcggatgaaaaatttgtagattttgttatacacggtctagagcatcaatgtcctgctatacttcgaccattaattaggttgtttattgatatactattatttgttatagtaatttatatttttacggtacgtctagtaagtagaaattatcaaatgttgttggtggtgctagtcatcacattaactattttttattactttatactataatagtactagactgacttctaacaaacatctcacctgccataaataaatgcttgatattaaagtcttctatttctaacactattccatctgtggaaaataatactctgacattatcgctaattgacacatcggtgagtgatatgcctataaagtaataatcttctttgggcacatataccagtgtaccaggttctaacaacctatttactggtgctcctgtagcatactttttctttaccttgagaatatccatcgtttgcttggtcaatagcgatatgtgattttttatcaaccactcaaaaaagtaattggagtgttcatatcctctacgggctattgtctcatggccgtgtatgaaatttaagtaacacgactgtggtagatttgttctatagagccgattgccgcaaatagatagaactaccaatatgtctgtacaaatgttaaacattaattgattaacagaaaaaacaatgttcgttctgggaatagaaaccagatcaaaacaaaattcgttagaatatatgccacgtttatacatggaatataaaataactacagtttgaaaaataacagtatcatttaaacatttaacttgcggggttaatctcacaactttactgtttttgaactgttcaaaatatagcatcgatccgtgagaaatacgtttagccgcctttaatagaggaaatcccaccgcctttctggatctcaccaacgacgatagttctgaccagcaactcatttcttcatcatccacctgttttaacatataataggcaggagatagatatccgtcattgcaatattccttctcgtaggcacacaatctaatattgataaaatctccattctcttctctgcatttattatcttgtctcggtggctgattaggctgtggtcttggtttaggccttggtctatcgttgttgaatctattttggtcattaaatctttcatttcttcctggtatatttctatcacctcgtttggttggatttttgtctatattatcgtttgtaacatcggtacgggtattcatttatcacaaaaaaaacttctctaaatgagtctactgctagaaaacctcatcgaagaagataccatattttttgcaggaagtatatctgagtatgatgatttacaaatggttattgccggcgcaaaatccaaatttccaagatctatgctttctatttttaatatagtacctagaacgatgtcaaaatatgagttggagttgattcataacgaaaatatcacaggagcaatgtttaccacaatgtataatataagaaacaatttgggtctaggagatgataaactaactattgaagccattgaaaactatttcttggatcctaacaatgaagttatgcctcttattattaataatacggatatgactgccgtcattcctaaaaaaagtggtaggagaaagaataagaacatggttatcttccgtcaaggatcatcacctatcttgtgcattttcgaaactcgtaaaaagattaatatttataaagaaaatatggaatccgcgtcgactgagtatacacctatcggagacaacaaggctttgatatctaaatatgcgggaattaatgtcctgaatgtgtattctccttccacatccataagattgaatgccatttacggattcaccaataaaaataaactagagaaacttagtactaataaggaactagaatcgtatagttctagccctcttcaagaacccattaggttaaatgattttctgggactattggaatgtgttaaaaagaatattcctctaacagatattccgacaaaggattgattactataaatggagaatgttcctaatgtatactttaatcctgtgtttatagagcccacgtttaaacattctttattaagtgtttataaacacagattaatagttttatttgaagtattcgttgtattcattctaatatatgtattttttagatctgaattaaatatgttcttcatgcctaaacgaaaaatacccgatcctattgatagattacgacgtgctaatctagcgtgtgaagacgataaattaatgatctatggattaccatggatgacaactcaaacatctgcgttatcaataaatagtaaaccgatagtgtataaagattgtgcaaagcttttgcgatcaataaatggatcacaaccagtatctcttaacgatgttcttcgcagatgatgattcattttttaagtatttggctagtcaagatgatgaatcttcattatctgatatattgcaaatcactcaatatctagactttctgttattattattgatccaatcaaaaaataaattagaagctgtgggtcattgttatgaatctctttcagaggaatacagacaattgacaaaattcacagactttcaagattttaaaaaactgtttaacaaggtccctattgttacagatggaagggtcaaacttaataaaggatatttgttcgactttgtgattagtttgatgcgattcaaaaaagaatcctctctagctaccaccgcaatagatcctgttagatacatagatcctcgtcgcaatatcgcattttctaacgtgatggatatattaaagtcgaataaagtgaacaataattaattctttattgtcatcatgaacggcggacatattcagttgataatcggccccatgttttcaggtaaaagtacagaattaattagacgagttagacgttatcaaatagctcaatataaatgcgtgactataaaatattctaacgataatagatacggaacgggactatggacgcatgataagaataattttgaagcattggaagcaactaaactatgtgatgtcttggaatcaattacagatttctccgtgataggtatcgatgaaggacagttctttccagacattgttgaattagatcgataaaaattaattaattacccgggtaccaggcctagatctgtcgagatccggtggtggtgcaaatcaaagaactgctcctcagtggatgttgcctttacttctaggcctgtacggaagtgttacttctgctctaaaagctgctgcagggggggggggggggtgggggggccggttagggccgccatcccctcagagcgtcgggatatcgggtggcggctcgggacggaggacgcgctagtgttcttctgtgtggcagttcagaatgatggatcaagctagatcagcattctctaacttgtttggtggagaaccattgtcatatacccggttcagcctggctcggcaagtagatggcgataacagtcatgtggagatgaaacttgctgtagatgaagaagaaaatgctgacaataacacaaaggccaatgtcacaaaaccaaaaaggtgtagtggaagtatctgctatgggactattgctgtgatcgtctttttcttgattggatttatgattggctacttgggctattgtaaaggggtagaaccaaaaactgagtgtgagagactggcaggaaccgagtctccagtgagggaggagccaggagaggacttccctgcagcacgtcgcttatattgggatgacctgaagagaaagttgtcggagaaactggacagcacagacttcaccagcaccatcaagctgctgaatgaaaattcatatgtccctcgtgaggctggatctcaaaaagatgaaaatcttgcgttgtatgttgaaaatcaatttcgtgaatttaaactcagcaaagtctggcgtgatcaacattttgttaagattcaggtcaaagacagcgctcaaaactcggtgatcatagttgataagaacggtagacttgtttacctggtggagaatcctgggggttatgtggcgtatagtaaggctgcaacagttactggtaaactggtccatgctaattttggtactaaaaaagattttgaggatttatacactcctgtgaatggatctatagtgattgtcagagcagggaaaatcacctttgcagaaaaggttgcaaatgctgaaagcttaaatgcaattggtgtgttgatatacatggaccagactaaatttcccattgttaacgcagaactttcattctttggacatgctcatctggggacaggtgacccttacacacctggattcccttccttcaatcacactcagtttccaccatctcggtcatcaggattgcctaatatacctgtccagacaatctccagagctgctgcagaaaagctgtttgggaatatggaaggagactgtccctctgactggaaaacagactctacatgtaggatggtaacctcagaaagcaagaatgtgaagctcactgtgagcaatgtgctgaaagagataaaaattcttaacatctttggagttattaaaggctttgtagaaccagatcactatgttgtagttggggcccagagagatgcatggggccctggagctgcaaaatccggtgtaggcacagctctcctattgaaacttgcccagatgttctcagatatggtcttaaaagatgggtttcagcccagcagaagcattatctttgccagttggagtgctggagactttggatcggttggtgccactgaatggctagagggatacctttcgtccctgcatttaaaggctttcacttatattaatctggataaagcggttcttggtaccagcaacttcaaggtttctgccagcccactgttgtatacgcttattgagaaaacaatgcaaaatgtgaagcatccggttactgggcaatttctatatcaggacagcaactgggccagcaaagttgagaaactcactttagacaatgctgctttccctttccttgcatattctggaatcccagcagtttctttctgtttttgcgaggacacagattatccttatttgggtaccaccatggacacctataaggaactgattgagaggattcctgagttgaacaaagtggcacgagcagctgcagaggtcgctggtcagttcgtgattaaactaacccatgatgttgaattgaacctggactatgagaggtacaacagccaactgctttcatttgtgagggatctgaaccaatacagagcagacataaaggaaatgggcctgagtttacagtggctgtattctgctcgtggagacttcttccgtgctacttccagactaacaacagatttcgggaatgctgagaaaacagacagatttgtcatgaagaaactcaatgatcgtgtcatgagagtggagtatcacttcctctctccctacgtatctccaaaagagtctcctttccgacatgtcttctggggctccggctctcacacgctgccagctttactggagaacttgaaactgcgtaaacaaaataacggtgcttttaatgaaacgctgttcagaaaccagttggctctagctacttggactattcagggagctgcaaatgccctctctggtgacgtttgggacattgacaatgagttttaaatgtgatacccatagcttccatgagaacagcagggtagtctggtttctagacttgtgctgatcgtgctaaattttcagtagggctacaaaacctgatgttaaaattccatcccatcatcttggtactactagatgtctttaggcagcagcttttaatacagggtagataacctgtacttcaagttaaagtgaataaccacttaaaaaatgtccatgatggaatattcccctatctctagaattttaagtgctttgtaatgggaactgcctctttcctgttgttgttaatgaaaatgtcagaaaccagttatgtgaatgatctctctgaatcctaagggctggtctctgctgaaggttgtaagtggtcgcttactttgagtgatcctccaacttcatttgatgctaaataggagataccaggttgaaagaccttctccaaatgagatctaagcctttccataaggaatgtagctggtttcctcattcctgaaagaaacagttaactttcagaagagatgggcttgttttcttgccaatgaggtctgaaatggaggtccttctgctggataaaatgaggttcaactgttgattgcaggaataaggccttaatatgttaacctcagtgtcatttatgaaaagaggggaccagaagccaaagacttagtatattttcttttcctctgtcccttcccccataagcctccatttagttctttgttatttttgtttcttccaaagcacattgaaagagaaccagtttcaggtgtttagttgcagactcagtttgtcagactttaaagaataatatgctgccaaattttggccaaagtgttaatcttaggggagagctttctgtccttttggcactgagatatttattgtttatttatcagtgacagagttcactataaatggtgtttttttaatagaatataattatcggaagcagtgccttccataattatgacagttatactgtcggttttttttaaataaaagcagcatctgctaataaaacccaacagatactggaagttttgcatttatggtcaacacttaagggttttagaaaacagccgtcagccaaatgtaattgaataaagttgaagctaagatttagagatgaattaaatttaattaggggttgctaagaagcgagcactgaccagataagaatgctggttttcctaaatgcagtgaattgtgaccaagttataaatcaatgtcacttaaaggctgtggtagtactcctgcaaaattttatagctcagtttatccaaggtgtaactctaattcccattttgcaaaatttccagtacctttgtcacaatcctaacacattatcgggagcagtatcttccataatgtataaagaacaaggtagtttttacctaccacagtgtctgtatcggagacagtgatctccatatgttacactaagggtgtaagtaattatcgggaacagtgtttcccataattttcttcatgcaatgacatcttcaaagcttgaagatcgttagtatctaacatgtatcccaactcctataattccctatcttttagttttagttgcagaaacattttgtggtcattaagcattgggtgggtaaattcaaccactgtaaaatgaaattactacaaaatttgaaatttagcttgggtttttgttacctttatggtttctccaggtcctctacttaatgagatagtagcatacatttataatgtttgctattgacaagtcattttaactttatcacattatttgcatgttacctcctataaacttagtgcggacaagttttaatccagaattgaccttttgacttaaagcagagggactttgtatagaaggtttgggggctgtggggaaggagagtcccctgaaggtctgacacgtctgcctacccattcgtggtgatcaattaaatgtaggtatgaataagttcgaagctccgtgagtgaaccatcattataaacgtgatgatcagctgtttgtcatagggcagttggaaacggcctcctagggaaaagttcatagggtctcttcaggttcttagtgtcacttacctagatttacagcctcacttgaatgtgtcactactcacagtctctttaatcttcagttttatctttaatctcctcttttatcttggactgacatttagcgtagctaagtgaaaaggtcatagctgagattcctggttcgggtgttacgcacacgtacttaaatgaaagcatgtggcatgttcatcgtataacacaatatgaatacagggcatgcattttgcagcagtgagtctcttcagaaaacccttttctacagttagggttgagttacttcctatcaagccagtacgtgctaacaggctcaatattcctgaatgaaatatcagactagtgacaagctcctggtcttgagatgtcttctcgttaaggagatgggccttttggaggtaaaggataaaatgaatgagttctgtcatgattcactattctagaacttgcatgacctttactgtgttagctctttgaatgttcttgaaattttagactttctttgtaaacaaatgatatgtccttatcattgtataaaagctgttatgtgcaacagtgtggagattccttgtctgatttaataaaatacttaaacactgaaaaaaaaaaaaaaaaaaaaaaaaaaaaaaaaaaaaaaaaaaaaaaaaaaaaaaaaaaaaaaaaaaaaaaaaaaaaaaaaagtaccttctgaggcggaaagaaccagccggatctcgacttcgagcttatttatattccaaaaaaaaaaaataaaatttcaatttttaagctttcactaattccaaacccacccgctttttatagtaagtttttcacccataaataataaatacaataattaatttctcgtaaaagtagaaaatatattctaatttattgcacggtaaggaagtagatcataactcgagcatgggagatcccgtcgttttacaacgtcgtgactgggaaaaccctggcgttacccaacttaatcgccttgcagcacatccccctttcgccagctggcgtaatagcgaagaggcccgcaccgatcgcccttcccaacagttgcgcagcctgaatggcgaatggcgctttgcctggtttccggcaccagaagcggtgccggaaagctggctggagtgcgatcttcctgaggccgatactgtcgtcgtcccctcaaactggcagatgcacggttacgatgcgcccatctacaccaacgtgacctatcccattacggtcaatccgccgtttgttcccacggagaatccgacgggttgttactcgctcacatttaatgttgatgaaagctggctacaggaaggccagacgcgaattatttttgatggcgttaactcggcgtttcatctgtggtgcaacgggcgctgggtcggttacggccaggacagtcgtttgccgtctgaatttgacctgagcgcatttttacgcgccggagaaaaccgcctcgcggtgatggtgctgcgctggagtgacggcagttatctggaagatcaggatatgtggcggatgagcggcattttccgtgacgtctcgttgctgcataaaccgactacacaaatcagcgatttccatgttgccactcgctttaatgatgatttcagccgcgctgtactggaggctgaagttcagatgtgcggcgagttgcgtgactacctacgggtaacagtttctttatggcagggtgaaacgcaggtcgccagcggcaccgcgcctttcggcggtgaaattatcgatgagcgtggtggttatgccgatcgcgtcacactacgtctgaacgtcgaaaacccgaaactgtggagcgccgaaatcccgaatctctatcgtgcggtggttgaactgcacaccgccgacggcacgctgattgaagcagaagcctgcgatgtcggtttccgcgaggtgcggattgaaaatggtctgctgctgctgaacggcaagccgttgctgattcgaggcgttaaccgtcacgagcatcatcctctgcatggtcaggtcatggatgagcagacgatggtgcaggatatcctgctgatgaagcagaacaactttaacgccgtgcgctgttcgcattatccgaaccatccgctgtggtacacgctgtgcgaccgctacggcctgtatgtggtggatgaagccaatattgaaacccacggcatggtgccaatgaatcgtctgaccgatgatccgcgctggctaccggcgatgagcgaacgcgtaacgcgaatggtgcagcgcgatcgtaatcacccgagtgtgatcatctggtcgctggggaatgaatcaggccacggcgctaatcacgacgcgctgtatcgctggatcaaatctgtcgatccttcccgcccggtgcagtatgaaggcggcggagccgacaccacggccaccgatattatttgcccgatgtacgcgcgcgtggatgaagaccagcccttcccggctgtgccgaaatggtccatcaaaaaatggctttcgctacctggagagacgcgcccgctgatcctttgcgaatacgcccacgcgatgggtaacagtcttggcggtttcgctaaatactggcaggcgtttcgtcagtatccccgtttacagggcggcttcgtctgggactgggtggatcagtcgctgattaaatatgatgaaaacggcaacccgtggtcggcttacggcggtgattttggcgatacgccgaacgatcgccagttctgtatgaacggtctggtctttgccgaccgcacgccgcatccagcgctgacggaagcaaaacaccagcagcagtttttccagttccgtttatccgggcaaaccatcgaagtgaccagcgaatacctgttccgtcatagcgataacgagctcctgcactggatggtggcgctggatggtaagccgctggcaagcggtgaagtgcctctggatgtcgctccacaaggtaaacagttgattgaactgcctgaactaccgcagccggagagcgccgggcaactctggctcacagtacgcgtagtgcaaccgaacgcgaccgcatggtcagaagccgggcacatcagcgcctggcagcagtggcgtctggcggaaaacctcagtgtgacgctccccgccgcgtcccacgccatcccgcatctgaccaccagcgaaatggatttttgcatcgagctgggtaataagcgttggcaatttaaccgccagtcaggctttctttcacagatgtggattggcgataaaaaacaactgctgacgccgctgcgcgatcagttcacccgtgcaccgctggataacgacattggcgtaagtgaagcgacccgcattgaccctaacgcctgggtcgaacgctggaaggcggcgggccattaccaggccgaagcagcgttgttgcagtgcacggcagatacacttgctgatgcggtgctgattacgaccgctcacgcgtggcagcatcaggggaaaaccttatttatcagccggaaaacctaccggattgatggtagtggtcaaatggcgattaccgttgatgttgaagtggcgagcgatacaccgcatccggcgcggattggcctgaactgccagctggcgcaggtagcagagcgggtaaactggctcggattagggccgcaagaaaactatcccgaccgccttactgccgcctgttttgaccgctgggatctgccattgtcagacatgtataccccgtacgtcttcccgagcgaaaacggtctgcgctgcgggacgcgcgaattgaattatggcccacaccagtggcgcggcgacttccagttcaacatcagccgctacagtcaacagcaactgatggaaaccagccatcgccatctgctgcacgcggaagaaggcacatggctgaatatcgacggtttccatatggggattggtggcgacgactcctggagcccgtcagtatcggcggaattccagctgagcgccggtcgctaccattaccagttggtctggtgtcaaaaataataataaccgggcaggggggatccaattctgtgagcgtatggcaaacgaaggaaaaatagttatagtagccgcactcgatgggacatttcaacgtaaaccgtttaataatattttgaatcttattccattatctgaaatggtggtaaaactaactgctgtgtgtatgaaatgctttaaggaggcttccttttctaaacgattgggtgaggaaaccgagatagaaataataggaggtaatgatatgtatcaatcggtgtgtagaaagtgttacatcgactcataatattatattttttatctaaaaaactaaaaataaacattgattaaattttaatataatacttaaaaatggatgttgtgtcgttagataaaccgtttatgtattttgaggaaattgataatgagttagattacgaaccagaaagtgcaaatgaggtcgcaaaaaaactgccgtatcaaggacagttaaaactattactaggagaattattttttcttagtaagttacagcgacacggtatattagatggtgccaccgtagtgtatataggatctgctcccggtacacatatacgttatttgagagatcatttctataatttaggagtgatcatcaaatggatgctaattgacggccgccatcatgatcctattttaaatggattgcgtgatgtgactctagtgactcggttcgttgatgaggaatatctacgatccatcaaaaaacaactgcatccttctaagattattttaatttctgatgtgagatccaaacgaggaggaaatgaacctagtacggcggatttactaagtaattacgctctacaaaatgtcatgattagtattttaaaccccgtggcgtctagtcttaaatggagatgcccgtttccagatcaatggatcaaggacttttatatcccacacggtaataaaatgttacaaccttttgctccttcatattcagctgaaatgagattattaagtatttataccggtgagaacatgagactgactcgagttaccaaattagacgctgtaaattatgaaaaaaagatgtactaccttaataagatcgtccgtaacaaagtagttgttaactttgattatcctaatcaggaatatgactattttcacatgtactttatgctgaggaccgtgtactgcaataaaacatttcctactactaaagcaaaggtactatttctacaacaatctatatttcgtttcttaaatattccaacaacatcaactgaaaaagttagtcatgaaccaatacaacgtaaaatatctagcaaaaattctatgtctaaaaacagaaatagcaagagatccgtacgcggtaataaatagaaacgtactactgagatatactaccgatatagagtataatgatttagttactttaataaccgttagacataaaattgattctatgaaaactgtgtttcaggtatttaacgaatcatccataaattatactccggttgatgatgattatggagaaccaatcattataacatcgtatcttcaaaaaggtcataacaagtttcctgtaaattttctatacatagatgtggtaatatctgacttatttcctagctttgttagactagatactacagaaactaatatagttaatagtgtactacaaacaggcgatggtaaaaagactcttcgtcttcccaaaatgttagagacggaaatagttgtcaagattctctatcgccctaatataccattaaaaattgttagatttttccgcaataacatggtaactggagtagagatagccgatagatctgttatttcagtcgctgattaatcaattagtagagatgagataagaacattataataatcaataatatatcttatatcttatatcttatatcttatatcttgtttagaaaaatgctaatattaaaatagctaacgctagtaatccaatcggaagccatttgatatctataatagggtatctaatttcctgatttaaatagcggacagctatattctcggtagctactcgtttggaatcacaaacattatttacatctaatttactatctgtaatggaaacgtttcccaatgaaatggtacaatccgatacattgcattttgttatatttttttttaaagaggctggtaacaacgcatcgcttcgtttacatggctcgtaccaacaataatagggtaatcttgtatctattcctatccgtactatgcttttatcaggataaatacatttacatcgtatatcgtctttgttagcatcacagaatgcataaatttgttcgtccgtcatgataaaaatttaaagtgtaaatataactattatttttatagttgtaataaaaagggaaatttgattgtatactttcggttctttaaaagaaactgacttgataaaaatggctgtaatctctaaggttacgtatagtctatatgatcaaaaagagattaatgctacagatattatcattagtcatgttaaaaatgacgacgatatcggtaccgttaaagatggtagactaggtgctatggatggggcattatgtaagacttgtgggaaaacggaattggaatgtttcggtcactggggtaaagtaagtatttataaaactcatatagttaagcctgaatttatttcagaaattattcgtttactgaatcatatatgtattcactgcggattattgcgttcacgagaaccgtattccgacgatattaacctaaaagagttatcgggacacgctcttaggagattaaaggataaaatattatccaagaaaaagtcatgttggaacagtgaatgtatgcaaccgtatcaaaaaattactttttcaaagaaaaaggtttgtttcgtcaacaagttggatgatattaacgttcctaattctctcatctatcaaaagttaatttctattcatgaaaagttttggccattattagaaattcatcaatatccagctaacttattttatacagactactttcccatccctccgttgattattagaccggctattagtttttggatagatagtatacccaaagagaccaatgaattaacttacttattaggtatgatcgttaagaattgtaacttgaatgctgatgaacaggttatccagaaggcggtaatagaatacgatgatattaaaattatttctaataacactaccagtatcaatttatcatatattacatccggcaaaaataatatgattagaagttatatcgtcgcccgacgaaaagatcagaccgctagatctgtaattggtcccagtacatctatcaccgttaatgaggtaggaatgcccgcatatattagaaatacacttacagaaaagatatttgttaatgcctttacagtggataaagttaaacaactattagcgtcaaaccaagttaaattttactttaataaacgattaaaccaattaacaagaatacgccaaggaaagtttattaaaaataaaatacatttattgcctggtgattgggtagaagtagctgttcaagaatatacaagtattatttttggaagacagccgtctctacatagatacaacgtcatcgcttcatctatcagagctaccgaaggagatactatcaaaatatctcccggaattgccaactctcaaaatgctgatttcgacggggatgaggaatggatgatattagaacaaaatcctaaagctgtaattgaacaaagtattcttatgtatccgacgacgttactcaaacacgatattcatggagcccccgtttatggatctattcaagatgaaatcgtagcagcgtattcattgtttaggatacaagatctttgtttagatgaagtattgaacatcttggggaaatatggaagagagttcgatcctaaaggtaaatgtaaattcagcggtaaagatatctatacttacttgataggtgaaaagattaattatccgggtctcttaaaggatggtgaaattattgcaaacgacgtagatagtaattttgttgtggctatgaggcatctgtcattggctggactcttatccgatcataagtcgaacgtggaaggtatcaactttattatcaagtcatcttatgtttttaagagatatctatctatttacggttttggggtgacattcaaagatctgagaccaaattcgacgttcactaataaattggaggccatcaacgtagaaaaaatagaacttatcaaagaagcatacgccaaatatctcaacgatgtaagagacgggaaaatagttccattatctaaagctttagaggcggactatgtggaatccatgttatccaacttgacaaatcttaatatccgagagatagaagaacatatgagacaaacgctgatagatgatccagataataacctcctgaaaatggccaaagcgggttataaagtaaatcccacagaactaatgtatattctaggtacgtatggacaacaaaggattgatggtgaaccagcagagactcgagtattgggtagagttttaccttactatcttccagactctaaggatccagaaggaagaggttacattcttaattctttaacaaaaggattaacgggttctcaatattacttttcgatgctggttgccagatctcaatctactgatatcgtctgtgaaacatcacgtaccggaacactggctagaaaaatcattaaaaagatggaggatatggtggtcgacggatacggacaagtagttataggtaatacgctcatcaagtacgccgccaattataccaaaattctaggctcagtatgtaaacctgtagatcttatctatccagatgagtccatgacttggtatttggaaattagtgctctgtggaataaaataaaacagggattcgtttactctcagaaacagaaacttgcaaagaagacattggcgccgtttaatttcctagtattcgtcaaacccaccactgaggataatgctattaaggttaaggatctgtacgatatgattcataacgtcattgatgatgtgagagagaaatacttctttacggtatctaatatagattttatggagtatatattcttgacgcatcttaatccttctagaattagaattacaaaagaaacggctatcactatctttgaaaagttctatgaaaaactcaattatactctaggtggtggaactcctattggaattatttctgcacaggtattgtctgagaagtttacacaacaagccctgtccagttttcacactactgaaaaaagtggtgccgtcaaacaaaaacttggtttcaacgagtttaataacttgactaatttgagtaagaataagaccgaaattatcactctggtatccgatgatatctctaaacttcaatctgttaagattaatttcgaatttgtatgtttgggagaattaaatccaaacatcactcttcgaaaagaaacagataaatatgtagtagatataatagtcaatagattatacatcaagagagcagaaataaccgaattagtcgtcgaatatatgattgaacgatttatctcctttagcgtcattgtaaaggaatggggtatggagacattcattgaggacgaggataatattagatttactgtctacctaaatttcgttgaaccggaagaattgaatcttagtaagtttatgatggttcttccgggggcagccaacaagggaaagattagtaaattcaagattcctatctctgattatacgggatatgacgacttcaatcaaacaaaaaagctcaataagatgactgtagaactcatgaatctaaaagaattgggttctttcgatttggaaaacgtcaacgtgtatcctggagtatggaatacatacgatatcttcggtatcgaggccgctcgtgaatacttgtgcgaagccatgttaaacacctatggagaagggttcgattatctgtatcagccttgtgatcttctcgctagtttactatgtgctagttacgaaccagaatcagtgaataaattcaagttcggcgcagctagtactcttaagagagctacgttcggagacaataaagcattgttaaacgcggctcttcataaaaagtcagaacctattaacgataatagtagctgccacttttttagcaaggtccctaatataggaactggatattacaaatactttatcgacttgggtcttctcatgagaatggaaaggaaactatctgataagatatcttctcaaaagatcaaggaaatggaagaaacagaagacttttaattcttatcaataacatatttttctatgatctgtcttttaaacgatggattttccacaaatgcgcctctcaagtccctcatagaatgatacacgtataaaaaatatagcataggcaatgactccttatttttagacattagatatgccaaaatcatagccccgcttctatttactcccgcagcacaatgaaccaacacgggctcgtttcgttgatcacatttagataaaaaggcggttacgtcgtcaaaatatttactaatatcggtagttgtatcatctaccaacggtatatgaataatattaatattagagttaggtaatgtatatttatccatcgtcaaatttaaaacatatttgaacttaacttcagatgatggtgcatccatagcatttttataatttcccaaatacacattattggttacccttgtcattatagtgggagatttggctttgtgcatatctccagttgaacgtagtagtaagtatttatacaaacttttcttatccatttataacgtacaaatggataaaactactttatcggtaaacgcgtgtaatttagaatacgttagagaaaaggctatagtaggcgtacaagcagccaaaacatcaacacttatattctttgttattatattggcaattagtgcgctattactctggtttcagacgtctgataatccagtctttaatgaattaacgagatatatgcgaattaaaaatacggttaacgattggaaatcattaacggatagcaaaacaaaattagaaagtgatagaggtagacttctagccgctggtaaggatgatatatttgaattcaaatgtgtggatttcggcgcctattttatagctatgcgattggataagaaaacatatctgccgcaagctattaggcgaggtactggagacgcgtggatggttaaaaaggcggcaaaggtcgatccatctgctcaacaattttgtcagtatttgataaaacacaagtctaataatgttattacttgtggtaatgagatgttaaatgaattaggttatagcggttattttatgtcaccgcattggtgttccgattttagtaatatggaatagtgttagataaatgcggtaacgaatgttcctgtaaggaaccataacagcttagatttaacgttaaagatgagcataaacataataaacaaaattacaatcaaacttataacattaatatcaaacaatccaaaaaatgaaatcagtggagtagtaaacgcgtacataactcctggataacgtttagcagctgccgttcctattctagaccaaaaattcggtttcatgttttcgaaacggtattctgcaacaagtcgaggatcgtgttctacatatttggcggcattatccagtatctgcctattgatcttcatttcgttttcgattctggctatttcaaaataaaatcccgatgatagacctccagactttataatttcatctacgatgttcagcgccgtagtaactctaataatataggctgataagctaacatcataccctcctgtatatgtgaatatggcatgatttttgtccattacaagctcggttttaactttattgcctgtaataatttctctcatctgtaggatatctatttttttgtcatgcattgccttcaagacgggacgaagaaacgtaatatcctcaataacgttatcgttttctacaataactacatattctacctttttattttctaactcggtaaaaaaattagaatcccatagggctaaatgtctagcgatatttcttttcgtttcctctgtacacatagtgttacaaaaccctgaaaagaagtgagtatacttgtcatcatttctaatgtttcctccagtccactgtataaacgcataatccttgtaatgatctggatcatccttgactaccacaacatttcttttttctggcataacttcgttgtcctttacatcatcgaacttctgatcattaatatgctcatgaacattaggaaatgtttctgatggaggtctatcaataactggcacaacaataacaggagttttcaccgccgccatttagttattgaaattaatcatatacaactctttaatacgagttatattttcgtctatccattgtttcacattgacatatttcgacaaaaagatataaaatgcgtattccaatgcttctctgtttaatgaattactaaaatatacaaacacgtcactgtctggcaataaatgatatcttagaatattgtaacaatttattttgtattgcacatgttcgtgatctatgagttcttcttcgaatggcataggatctccgaatctgaaaacgtataaataggagttagaataataatatttgagagtattggtaatatataaactctttagcggtataattagtttttttctctcaatttctatttttagatgtgatggaaaaatgactaattttgtagcattagtatcatgaactctaatcaaaatcttaatatcttcgtcacacgttagctctttgaagtttttaagagatgcatcagttggttctacagatggagtaggtgcaacaattttttgttctacacatgtatgtactggagccattgttttaactataatggtgcttgtatcgaaaaactttaatgcagatagcggaagctcttcgccgcgactttctacgtcgtaattgggttctaacgccgatctctgaatggatactagttttctaagttctaatgtgattctctgaaaatgtaaatccaattcctccggcattatagatgtgtatacatcggtaaataaaactatagtatccaacgatcccttctcgcaaattctagtcttaaccaaaaaatcgtatataaccacggagatggcgtatttaagagtggattcttctaccgttttgttcttggatgtcatataggaaactataaagtccgcactactgttaagaatgattactaacgcaactatatagtttaaattaagcattttggaaacataaaataactctgtagacgatacttgactttcgaataagtttgcagacaaacgaagaaagaacagacctctcttaatttcagaagaaaactttttttcgtattcctgacgtctagagtttatatcaataagaaagttaagaattagtcggttaatgttgtatttcattacccaagtttgagatttcataatattatcaaaagacatgataatattaaagataaagcgctgactatgaacgaaatagctatatggttcgctcaagaatatagtcttgttaaacgtggaaacgataactgtatttttaatcacgtcagcggcatctaaattaaatataggtatatttattccacacactctacaatatgccacaccatcttcataataaataaattcgttagcaaaattattaattttagtgaaatagttagcgtcaactttcatagcttccttcaatctaatttgatgctcacacggtgcgaattccactctaacatcccttttccatgcctcaggttcatcgatctctataatatctagttttttgcgtttcacaaacacaggctcgtctctcgcgatgagatctgtatagtaactatgtaaatgataactagatagaaagatgtagctatatagatgacgatcctttaagagaggtataataactttaccccaatcagatagactgttgttatggtcttcggaaaaagaatttttataaatttttccagtattttccaaatatacgtacttaacatctaaaaaatccttaatgataataggaatggataatccgtctattttataaagaaatacatatcgcacattatacttttttttggaaatgggaataccgatgtgtctacataaatatgcaaagtctaaatattttttagagaatcttagttggtccaaattcttttccaagtacggtaatagatttttcatattgaacggtatcttcttaatctctggttctagttccgcattaaatgatgaaactaagtcactatttttataactaacgattacatcacctctaacatcatcatttaccagaatactgatcttcttttgtcgtaaatacatgtctaatgtgttaaaaaaaagatcatacaagttatacgtcatttcatctgtggtattcttgtcattgaaggataaactcgtactaatctcttctttaacagcctgttcaaatttatatcctatatacgaaaaaatagcaaccagtgtttgatcatccgcgtcaatattctgttctatcgtagtgtataacaatcgtatatcttcttctgtgatagtcgatacgttataaaggttgataacgaaaatatttttatttcgtgaaataaagtcatcgtaggattttggacttatattcgcgtctagtagatatgcttttatttttggaatgatctcaattagaatagtctctttagagtccatttaaagttacaaacaactaggaaattggtttatgatgtataatttttttagtttttatagattctttattctatacttaaaaaatgaaaataaatacaaaggttcttgagggttgtgttaaattgaaagcgagaaataatcataaattatttcattatcgcgatatccgttaagtttgtatcgtaatggcgtggtcaattacgaataaagcggatactagtagcttcacaaagatggctgaaatcagagctcatctaaaaaatagcgctgaaaataaagataaaaacgaggatattttcccggaagatgtaataattccatctactaagcccaaaaccaaacgagccactactcctcgtaaaccagcggctactaaaagatcaaccaaaaaggaggaagtggaagaagaagtagttatagaggaatatcatcaaacaactgaaaaaaattctccatctcctggagtcagcgacattgtagaaagcgtggccgctgtagagctcgatgatagcgacggggatgatgaacctatggtacaagttgaagctggtaaagtaaatcatagtgctagaagcgatctctctgacctaaaggtggctaccgacaatatcgttaaagatcttaagaaaattattactagaatctctgcagtatcgacggttctagaggatgttcaagcagctggtatctctagacaatttacttctatgactaaagctattacaacactatctgatctagtcaccgagggaaaatctaaagttgttcgtaaaaaagttaaaacttgtaagaagtaaatgcgtgcacttttttataaagatggtaaactctttaccgataataattttttaaatcctgtatcagacgataatccagcgtatgaggttttgcaacatgttaaaattcctactcatttaacagatgtagtagtatatgaacaaacgtgggaggaggcgttaactagattaatttttgtgggaagtgattcaaaaggacgtagacaatacttttacggaaaaatgcatgtacagaatcgcaacgctaaaagagatcgtatttttgttagagtatataacgttatgaaacgaattaattgttttataaacaaaaatataaagaaatcgtccacagattccaattatcagttggcggtttttatgttaatggaaactatgttttttattagatttggtaaaatgaaatatcttaaggagaatgaaacagtagggttattaacactaaaaaataaacacatagaaataagtcccgatgaaatagttatcaagtttgtaggaaaggacaaagtttcacatgaatttgttgttcataagtctaatagactatataaaccgctattgaaactgacggatgattctagtcccgaagaatttctgttcaacaaactaagtgaacgaaaggtatacgaatgtatcaaacagtttggtattagaatcaaggatctccgaacgtatggagtcaattatacgtttttatataatttttggacaaatgtaaagtccatatctcctcttccgtcaccaaaaaagttaatagcattaactatcaaacaaactgctgaagtggtaggtcatactccatcaatttcaaaaagagcttatatggcaacgactattttagaaatggtaaaggataaaaattttttagatgtagtatctaaaactacgttcgatgaattcctatctatagtcgtagatcacgttaaatcatctacggatggatgatatagatctttacacaaataattacaagaccgataaatggaaatggataagcgtatgaaatctctcgcaatgacagctttcttcggagagctaagcacattagatattatggcattgataatgtctatatttaaacgccatccaaacaataccattttttcagtggataaggatggtcagtttatgattgatttcgaatacgataattataaggcttctcaatatttggatctgaccctcactccgatatctggagatgaatgcaagactcacgcatcgagtatagccgaacaattggcgtgtgcggatattattaaagaggatattagcgaatatatcaaaactactccccgtcttaaacgatttataaaaaaataccgcaatagatcagatactcgtatcagtcgagatacagaaaagcttaaaatagctctagctaaaggcatagattacgaatatataaaagacgcttgttaataagtaaatgaaaaaaaactagtcgtttataataaaacacgatatggatgccaacgtagtatcattttctactattgcgacgtatatagacgctttagcgaagaatgcttcggaattagaacagaggtctaccgcatacgaaataaataatgaattggaactagtatttattaagccgccattgattactttgacaaatgtagtgaatatctctacgattcaggaatcgtttattcgatttaccgttactaataaggaaggtgttaaaattagaactaagattccattatctaaggtacatggtctagatgtaaaaaatgtacagttagtagatgctatagataacatagtttgggaaaagaaatcattagtgacggaaaatcgtcttcacaaagaatgcttgttgagactatcgacagaggaacgtcatatatttttggattacaagaaatatggatcctctatccgactagaattagtcaatcttattcaagcaaaaacaaaaaactttacgatagactttaagctaaaatattttctaggatccggtgcccagtctaaaagttctttgttgcacgctattaatcatccaaagtcaaggcctaatacatctctggaaatagaattcacacctagagacaatgaaacagttccatatgatgaactaataaaggaattgacgactctctcgcgtcatatatttatggcttctccagagaatgtaattctttctccgcctattaacgcgcctataaaaacctttatgttgcctaaacaagatatagtaggtttggatctggaaaatctatatgccgtaactaagactgacggcattcctataactatcagagttacatcaaacgggttgtattgttattttacacatcttggttatattattagatatcctgttaagagaataatagattccgaagtagtagtctttggtgaggcagttaaggataagaactggaccgtatatctcattaagctaatagagcctgtgaatgcaatcaatgatagactagaagaaagtaagtatgttgaatctaaactagtggatatttgtgatcggatagtattcaagtcaaagaaatacgaaggtccgtttactacaactagtgaagtcgtcgatatgttatctacatatttaccaaagcaaccagaaggtgttattctgttctattcaaagggacctaaatctaacattgattttaaaattaaaaaggaaaatactatagaccaaactgcaaatgtagtatttaggtacatgtccagtgaaccaattatctttggagaatcgtctatctttgtagagtataagaaatttagcaacgataaaggctttcctaaagaatatggttctggtaagattgtgttatataacggcgttaattatctaaataatatctattgtttggaatatattaatacacataatgaagtgggtattaagtccgtggttgtacctattaagtttatagcagaattcttagttaatggagaaatacttaaacctagaattgataaaaccatgaaatatattaactcagaagattattatggaaatcaacataatatcatagtcgaacatttaagagatcaaagcatcaaaataggagatatctttaacgaggataaactatcggatgtgggacatcaatacgccaataatgataaatttagattaaatccagaagttagttattttacgaataaacgaactagaggaccgttgggaattttatcaaactacgtcaagactcttcttatttctatgtattgttccaaaacatttttagacgattccaacaaacgaaaggtattggcgattgattttggaaacggtgctgacctggaaaaatacttttatggagagattgcgttattggtagcgacggatccggatgctgatgctatagctagaggaaatgaaagatacaacaaattaaactctggaattaaaaccaagtactacaaatttgactacattcaggaaactattcgatccgatacatttgtctctagtgtcagagaagtattctattttggaaagtttaatatcatcgactggcagtttgctatccattattcttttcatccgagacattatgctaccgtcatgaataacttatccgaactaactgcttctggaggcaaggtattaatcactaccatggacggagacaaattatcaaaattaacagataaaaagacttttataattcataagaatttacctagtagcgaaaactatatgtctgtagaaaaaatagctgatgatagaatagtggtatataatccatcaacaatgtctactccaatgactgaatacattatcaaaaagaacgatatagtcagagtgtttaacgaatacggatttgttcttgtagataacgttgatttcgctacaattatagaacgaagtaaaaagtttattaatggcgcatctacaatggaagatagaccgtctacaaaaaactttttcgaactaaatagaggagccattaaatgtgaaggtttagatgtcgaagacttacttagttactatgttgtttatgtcttttctaagcggtaaataataatatggtatgggttctgatctcccagttctaaatgcattaaataattccaatagagcgatttttgttcctataggaccttccaactgtggatactctgtattgttaatagatatattaatacttttgtcgggtaacagaggttctacgtcttctaaaaataaaagttttataacatctggcctgttcataaataaaaacttggcgattctatatatactcttattatcaaatctagccattgtcttatagatgtgagctactgtaggtgtaccatttgattttctttctaatactatatatttctctcgaagaagttcttgcacatcatctgggaataaaatactactgttgagtaaatcagttattttttttatatcgatattgatggacatttttatagttaaggataataagtatcccaaagtcgataacgacgataacgaagtatttatacttttaggaaatcacaatgactttatcagattaaaattaacaaaattaaaggagcatgtatttttttctgaatatattgtgactccagatacatatggatctttatgcgtcgaattaaatgggtctagttttcagcacggcggtagatatatagaggtggaggaatttatagatgctggaagacaagttagatggtgttctacatccaatcatatatctaaagatatacccgaagatatgcacactgataaatttgtcatttatgatatttatacgtttgattcgttcaagaataaacgattggtattcgtacaggtacctccgtcgttaggagatgatagtcatttgactaatccgttattgtcaccgtattatcgtaattcagtagccagacaaatggtcaatgatatgatttttaatcaagattcatttttaaaatatttattagaacatctgattagaagccactatagagtttctaaacatataacaatagttagatacaaggataccgaagaattaaatctaacgagaatatgttataatagagataagtttaaggcgtttgtattcgcttggtttaacggcgtttcggaaaatgaaaaggtactagatacgtataaaaaggtatctaatttgatataatgaattcagtgactgtatcacacgcgccatatactattacttatcacgatgattgggaaccagtaatgagtcaattggtagagttttataacgaagtagccagttggctgctacgagacgagacgtcgcctattcctgataagttctttatacagttgaaacaaccgcttagaaataaacgagtatgtgtgtgtggtatagatccgtatccgaaagatggaactggtgtaccgttcgaatcaccaaattttacaaaaaaatcaattaaggagatagcttcatctatatctagattaaccggagtaattgattataaaggttataaccttaatataatagacggggttataccctggaattattacttaagttgtaaattaggagaaacaaaaagtcacgcgatttactgggataagatttccaagttactgctgcagcatataactaaacacgttagtgttctttattgtttgggtaaaacagatttctcgaatatacgggccaagttagaatccccggtaactaccatagtcggatatcatccagcggctagagaccgccaattcgagaaagatagatcatttgaaattatcaacgttttactggaattagacaacaaggcacctataaattgggctcaagggtttatttattaatgctttagtgaaattttaacttgtgttctaaatggatgcggctattagaggtaatgatgttatctttgttcttaagactataggtgtcccgtcagcgtgcagacaaaatgaagatccaagatttgtagaagcatttaaatgcgacgagttagaaagatatattgagaataatccagaatgtacactattcgaaagtcttagggatgaggaagcatactctatagtcagaattttcatggatgtagatttagacgcgtgtctagacgaaatagattatttaacggccattcaagattttattatcgaggtgtcaaactgtgtagctagattcgcgtttacagaatgcggcgccattcatgaaaatgtaataaaatccatgagatctaatttttcattgactaagtctacaaatagagataaaacaagttttcatattatctttttagatacgtataccactatggatacattgatagctatgaaacgaacactattagaattaagtagatcatctgaaaatccactaaccagatcgatagacactgccgtatataggagaaaaacaactcttcgggttgtaggtactaggaaaaatccaaattgcgacactattcatgtaatgcaaccaccgcatgataatatagaagattacctattcacttacgtggatatgaacaacaatagttattacttttctctacaacaacgattggaggatttagttcctgataagttatgggaaccagggtttatttcattcgaagacgctataaaaagagtttcaaaaatattcattaattctataataaactttaatgatctcgatgaaaataattttacaacggtaccactggtcatagattacgtaacaccttgtgcattatgtaaaaaacgatcgcataaacatccgcatcaactatcgttggaaaatggtgctattagaatttacaaaactggtaatccacatagttgtaaagttaaaattgttccgttggatggtaataaactgtttaatattgcacaaagaattttagacactaactctgttttattaaccgaacgaggagaccatatagtttggattaataattcatggaaatttaacagcgaagaacccttgataacaaaactaattttgtcaataagacatcaactacctaaggaatattcaagcgaattactctgtccaagaaaacgaaagactgtagaagctaacatacgagacatgttagtagattcagtggagaccgatacctatccggataaacttccgtttaaaaatggtgtattggacctggtagacggaatgttttactctggagatgatgctaaaaaatatacgtgtactgtatcaaccggatttaaatttgacgatacaaagttcgtcgaagacagtccagaaatggaagagttaatgaatatcattaacgatatccaaccattaacggatgaaaataagaaaaatagagagctatatgaaaaaacattatctagttgtttatgcggtgctaccaaaggatgtttaacattcttttttggagaaactgcaactggaaagtcgacaaccaaacgtttgttaaagtctgctatcggtgacctgtttgttgagacgggtcaaacaattttaacagatgtattggataaaggacctaatccatttatcgctaacatgcatttgaaaagatctgtattctgtagcgaactacctgattttgcctgtagtggatcaaagaaaattagatctgacaatattaaaaagttgacagaaccttgtgtcattggaagaccgtgtttctccaataaaattaataatagaaaccatgcgacaatcattatcgatactaattacaaacctgtttttgataggatagataacgcattaatgagaagaattgccgtcgtgcgattcagaacacacttttctcaaccttctggtagagaggctgctgaaaataatgacgcgtacgataaagtcaaactattagacgaggggttagatggtaaaatacaaaataatatatatagatttgcatttctatacttgttggtgaaatggtacaaaaaatatcatgttcctattatgaaactatatcctacacccgaagagattcctgactttgcattctatctcaaaataggtactctgttggtatctagctctgtaaagcatattccattaatgacggacctctccaaaaagggatatatattgtacgataatgtggtcactcttccgttgactactttccaacagaaaatatccaagtattttaattctagactatttggacacgatatagagagcttcatcaatagacataagaaatttgccaatgttagtgatgaatatctgcaatatatattcatagaggatatttcatctccgtaaatatatgctcatatatttatagaagatatcacatatctaaatgaataccggaatcatagatttatttgataatcatgttgatagtataccaactatattacctcatcagttagctactctagattatctagttagaactatcatagatgagaacagaagcgtgttattgttccatattatgggatcaggtaaaacaataatcgctttgttgttcgccttggtagcttccagatttaaaaaggtttacattctagtgccgaacatcaacatcttaaaaattttcaattataatatgggtgtagctatgaacttgtttaatgacgaattcatagctgagaatatctttattcattccacaacaagtttttattctcttaattataacgataacgtcattaattataacggattatctcgctacaataactctatttttatcgttgatgaggcacataatatctttgggaataatactggagaacttatgaccgtgataaaaaataaaaacaagattccttttttactattgtctggatctcccattactaacacacctaatactctgggtcatattatagatttaatgtccgaagagacgatagattttggtgaaattattagtcgtggtaagaaagtaattcagacacttcttaacgaacgcggtgtgaatgtacttaaggatttgcttaaaggaagaatatcatattacgaaatgcctgataaagatctaccaacgataagatatcacggacgtaagtttctagatactagagtagtatattgtcacatgtctaaacttcaagagagagattatatgattactagacgacagctatgttatcatgaaatgtttgataaaaatatgtataacgtgtcaatggcagtattgggacaacttaatctgatgaataatttagatactttatttcaggaacaggataaggaattgtacccaaatctgaaaataaataatggcgtgttatacggagaagaattggtaacgttaaacattagttccaaatttaaatactttattaatcggatacagacactcaacggaaaacattttatatacttttctaattctacatatggcggattggtaattaaatatatcatgctcagtaatggatattctgaatataatggttctcagggaactaatccacatatgataaacggcaaaccaaaaacatttgctatcgttactagtaaaatgaaatcgtctttagaggatctattagatgtgtataattctcctgaaaacgatgatggtagtcaattgatgtttttgttttcatcaaacattatgtccgaatcctatactctaaaagaggtaaggcatatttggtttatgactatcccagatactttttctcaatacaaccaaattcttggacgatctattagaaaattctcttacgccgatatttctgaaccagttaatgtatatcttttagccgccgtatattccgatttcaatgacgaagtgacgtcattaaacgattacacacaggatgaattaattaatgttttaccatttgacatcaaaaagctgttgtatctaaaatttaagacgaaagaaacgaatagaatatactctattcttcaagagatgtctgaaacgtattctcttccaccacatccatcaattgtaaaagttttattgggagaattggtcagacaatttttttataataattctcgtattaagtataacgataccaagttacttaaaatggttacatcagttataaaaaataaagaagacgctaggaattacatagatgatattgtaaacggtcacttctttgtatcgaataaagtatttgataaatctcttttatacaaatacgaaaacgatattattacagtaccgtttagactttcctacgaaccatttgtttggggagttaactttcgtaaagaatataacgtggtatcttctccataaaactgatgagatatataaagaaataaatgtcgagctttgttaccaatggatacctttccgttacattggaaccacacgagctgacgttagacataaaaactaatattaggaatgccgtatataagacgtatctccatagagaaattagtggtaaaatggccaagaaaatagaaattcgtgaagacgtggaattacctctcggcgaaatagttaataattctgtagttataaacgttccgtgtgtaataacctacgcgtattatcacgttggggatatagtcagaggaacattaaacatcgaagatgaatcaaatgtaactattcaatgtggagatttaatctgtaaactaagtagagattcgggtactgtatcatttagcgattcaaagtactgcttttttcgaaatggtaatgcgtatgacaatggcagcgaagtcactgccgttctaatggaggctcaacaaggtatcgaatctagttttgtttttctcgcgaatatcgtcgactcataaaaaagagaatagcggtaagtataaacacgaatactatggcaataattgcgaatgttttattctcttcgatatatttttgataatatgaaaaacatgtctctctcaaatcggacaaccatctcataaaatagttctcgcgcgctggagaggtagttgccgctcgtataatctctccagaataatatacttgcgtgtcgtcgttcaatttatacggatttctatagttctctgttatataatgcggtttgccctcatgattagacgacgacaatagtgttctaaatttagatagttgatcagaatgaatgtttattggcgttggaaaaattatccatacagcgtctgcagagtggttgatagttgttcctagatatgtaaaataatccaacttactaggcagcaaattgtctagataaaatactgaatcaaacggtgcagacgtattggcggatctaatggaatccaattgattaactatcttttgaaaatatacatttttatgatccaatacttgtaagaatatagaaataatgataagtccatcatcgtgtttttttgcctcttcataagaactatattttttcttattccaatgaacaagattaatctctccagagtatttgtacacatctatcaagtgattggatccataatcgtcttcctttccccaatatatatgtagtgatgataacacatattcattggggagaaaccctccacttatatatcctcctttaaaattaatccttactagttttccagtgttctggatagtggttggtttcgactcattataatgtatgtctaacggcttcaatcgcgcgttagaaattgcttttttagtttctatattaataggagatagttgttgcggcatagtaaaaatgaaatgataactgtttaaaaatagctcttagtatgggaattacaatggatgaggaagtgatatttgaaactcctagagaattaatatctattaaacgaataaaagatattccaagatcaaaagacacgcatgtgtttgctgcgtgtataacaagtgacggatatccgttaataggagctagaagaacttcattcgcgttccaggcgatattatctcaacaaaattcagattctatctttagagtatccactaaactattacggtttatgtactacaatgaactaagagaaatctttagacggttgagaaaaggttctatcaacaatatcgatcctcactttgaagagttaatattattgggtggtaaactagataaaaaggaatctattaaagattgtttaagaagagaattaaaagaggaaagtgatgaacgtataacagtaaaagaatttggaaatgtaattctaaaacttacaacacgggataaattatttaataaagtatatataagttattgcatggcgtgttttattaatcaatcgttggaggatttatcgcatactagtatttacaatgtagaaattagaaagattaaatcattaaatgattgtattaacgacgataaatacgaatatctgtcttatatttataatatgctagttaatagtaaatgaacttttacagatctagtataattagtcagattattaagtataatagacgactagctaagtctattatttgcgaggatgactctcaaattattacactcacggcattcgttaaccaatgcctatggtgtcataaacgagtatccgtgtccgctattttattaactactgataacaaaatattagtatgtaacagacgagatagttttctctattctgaaataattagaactagaaacatgtttagaaagaaacgattatttctgaattattccaattatttgaacaaacaggaaagaagtatactatcgtcatttttttctctagatccagctactactgataatgatagaatagacgctatttatccgggtggcatacccaaaaggggtgagaatgttccagagtgtttatccagggaaattaaagaagaagttaatatagacaattcttttgtattcatagacactcggttttttattcatggcatcatagaagataccattattaataaattttttgaggtaatcttctttgtcggaagaatatctctaacgagtgatcaaatcattgatacatttaaaagtaatcatgaaatcaaggatctaatatttttagatccgaattcaggtaatggactccaatacgaaattgcaaaatatgctctagatactgcaaaacttaaatgttacggccatagaggatgttattatgaatcattaaaaaaattaactgaggatgattgattaaaaaatataaattaatttaccatcgtgtatttttataacgggattgtccggcatatcatgtagatagttaccgtctacatcgtatactcgaccatctacgcctttaaatcctctatttattgacattaatctattagaattggaataccaaatattagtaccctcaattagtttattggtaatattttttttagacgatagatcgatggctcttgaaaccaaggttttccaaccggactcattgtcgatcggtgagaagtctttttcattagcatgaatccattctaatgatgtatgtttaaacactctaaacaattggacaaattcttttgatttgctttgaatgatttcaaataggtcttcgtctacagtaggcataccattagataatctagccattataaagtgcacgtttacatatctacgttctggaggagtaagaacgtgactattgagacgaatggctcttcctactatctgacgaagagacgcctcgttccatgtcatatctaaaatgaagatatcattaattgagaaaaaactaataccctcgcctccactagaagagaatacgcatgttttaatgcattctccgttagtgtttgattcttggttaaactcagccaccgccttgattctagtatcttttgttctagatgagaactctatattagagataccaaagactttgaaatatagtaataagatttctattcctgactgattaacaaatggttcaaagactagacatttaccatgggatgctaatattcccaaacatacatctataaatttgacgcttttctcttttaattcagtaaatagagagatatcagccgcactagcatcccctttcaatagttctccctttttaaaggtatctaatgcggatttagaaaactctctatctcttaatgaatttttaaaatcattatatagtgttgctatctcttgcgcgtattcgcccggatcacgattttgtctttcaggaaagctatcgaacgtaaacgtagtagccatacgtctcagaattctaaatgatgatatacctgtttttatttcagcgagtttagccttttgataaatttcttcttgctttttcgacatattaacgtatcgcattaatactgttttcttagcgaatgatgcagacccttctacgtcatcaaaaatagaaaactcgttattaactatatacgaacatagtcctcctagtttggagactaattctttttcatcgactagacgtttattctcaaatagcgattggtgttgtaaggatcctggtcgtagtaagttaaccaacatggtgaattcttgcacactattgacgataggtgtagccgataaacaaatcatcttatggttttttaacgcaatggtcttagataaaaaattatatactgaacgagtaggacggatcttaccatcttctttgattaatgatttagaaatgaagttatgacattcatcaataatgacgcatattctactcttggaattaatagttttgatattagtaaaaaatttatttctaaaattttgatcatcgtaattaataaaaatacaatccttcgttatctctggagcgtatctgagtatagtgttcatccaaggatcttctatcaaagcctttttcaccaataagataatagcccaattcgtataaatatccttaagatgtttgagaatatatacagtagtcattgttttaccgacacccgtttcatggaacaataaaagagaatgcatactgtctaatcctaagaaaactcttgctacaaaatgttgataatccttgaggcgtactacgtccgaccccatcatttcaacgggcatattagtagttctgcgtaaggcataatcgatataggccgcgtgtgatttactcatttatgagtgataagtaataactatgttttaaaaatcacagcagtagtttaactagtcttctctgatgtttgttttcgatactttttgaatcagaagtcatactagaataaagcaacgagtgaacgtaatagagagcttcgtatactctattcgaaaactctaagaacttattaatgaattccgtatccactggattgtttaaaatactaaattgaacactgttcacatccttccaagaagaagacttagtgacggacttaacatgagacataaataaatccaaattttttttacaaacatcactagccaccataatggcgctatctttcaaccagctatcgcttacgcattttagcagtctaacatttttaaagagactacaatatattctcatagtatcgattacacctctaccgaataaagttggaagtttaataatacaatatttttcgtttacaaaatcaaataatggtcgaaacacgtcgaaggttaacatcttataatcgctaatgtatagattgttttcagtgagatgattattagatttaatagcatctcgttcacgtttgaacagtttattgcgtgcgctgaggtcggcaactacggcgtccgctttagtactcctcccataatactttacgctattaatctttaaaatttcatagactttatctagatcgctttctggtaacatgatatcatgtgtaaaaagttttaacatgtcggtcggcattctatttagatcattaactctagaaatctgaagaaagtaattagctccgtattccagactaggtaatgggcttttacctagagacagattaagttctggcaatgtttcataaaatggaagaaggacatgcgttccctcccggatattttttacaatttcatccatttacaactctatagtttgttttcattattattagttattatctcccataatcttggtaatacttaccccttgatcgtaagataccttatacaggtcattacatacaactaccaattgtttttgtacataatagattggatggttgacatccatggtggaataaactactcgaacagatagtttatctttccccctagatacattagccgtaatagttgtcggcctaaagaatatctttggtgtaaagttaaaagttagggttcttgttccattattgctttttgtcagtagttcattataaattctcgagatgggtccgttctctgaatatagaacatcatttccaaatctaacttctagtctagaaataatatcggtcttattcttaaaatctattcccttgatgaagggatcgttaatgaacaaatccttggcctttgattcggctgatctattatctccgttatagacgttacgttgactagtccaaagacttacaggaatagatgtatcgatgatgttgatactatgtgatatgtgagcaaagattgttctcttagtggcatcactatatgttccagtaatggcggaaaactttttagaaatgttatatataaaagaattttttcgtgttccaaacattagcagattagtatgaagataaacactcatattatcaggaacattatcaatttttacatacacatcagcatcttgaatagaaacgataccatcttctggaacctctacgatctcggcagactccggataaccagtcggtgggccatcgctaacaataactagatcatccaacaatctactcacatatgcatctatataatctttttcatcttgtgagtaccctggatacgaaataaatttattatccgtatttccataataaggtttagtataaacagagagagatgttgccgcatgaacttcagttacagtcgccgttggttggtttatttgacctattactctcctaggtttctctataaacgatggtttaatttgtacattcttaaccatatatccaataaagctcaattcaggaacataaacaaattctttgttgaacgtttcaaagtcgaacgaagagtcacgaataacgatatcggatactggattgaaggttaccgttacggtaatttttgaatcggatagtttaagactgctgaatgtatcttccacatcaaacggagttttaatataaacgtatactgtagatggttctttaatagtgtcattaggagttaggccaatagaaatatcattaagttcactagaatatccagagtgtttcaaagcaattgtattattgatacaattattatataattcttcgccctcaatttcccaaataacaccgttacacgaagagatagatacgtgattaatacatttatatccaacatatggtacgtaactgaatcttcccatacctttaacttctggaagttccaaactcagaaccaaatgattaagcgcagtaatatactgatccctaatttcgaagctagcgatagcctgattgtctggaccatcgtttgtcataactccggatagagaaatatattgcggcatatacaaagttggaatttgactatcgactgcgaagacattagaccgtttaatagagtcatccccaccgatcaaagaattaatgatagtattattcattttctatttaaaatggaaaaagcttacaataaactccgtagagaaatatctataatttgtgagttttccttaaagtaacagcttccgtaaacgccgtctttatctcttagtaggtttattgtatttatgaccttttccttatcttcatagaatactaaaggcaacaaagaaatttttggttcttctctaagagctacgtgagacttaaccatagaagccaacgaatccctacatattttagaacagaaataccctacttcaccacccttgtatgtctcaatactaataggtctaaaaaccaaatcttgattacaaaaccaacacttatcaattacactatttgtcttaatagacacatctgccatagatttataatactttggtagtatacaagcgagtgcttcttctttagcgggcttaaagactgctttaggtgctgaaataaccacatctggaaggcttactcgcttagccatttaattacggaactatttttttatacttctaatgagcaagtagaaaacctctcatctacaaaaacgtactcgtgtccataatcctctaccatagttacacgttttttagatctcatatgtgctaaaaagttttcccatactaattggttactattatttttcgtataatttttaacagtttgaggttttagatttttagttacagaagtgatatcgaatattttatccaaaaagaatgaataattaattgtcttagaaggagtgttttcttggcaaaagaataccaagtgcttaaatatttctactacttcattaatcttttctgtactcagattcagtttctcatcttttacttgattgattatttcaaagactaacttataatcctttttatttattctctcgttagccttaagaaaactagatacaaaatttgcatctacatcatccgtggatatttgatttttttccatgatatccaagagttccgagataatttctccagaacattgatgagacaataatctccgcaatacatttctcaaatgaataagtttattagacacgtggaagtttgactttttttgtacctttgtacatttttgaaataccgactcgcaaaaaatacaatattcatatccttgttcagatactataccgttatgtctacaaccgctacataatcgtagattcatgttaacactctacgtatctcgtcgtccaatattttatataaaaacattttatttctagacgttgccagaaaatcctgtaatatttttagttttttgggctgtgaataaagtatcgccctaatattgttaccgtcttccgccaatatagtagttaaattatccgcacatgcagaagaacaccgcttaggcggattcagtacaatgttatatttttcgtaccaactcatttaaatatcataatctaaaatagttctgtaatatgtctagcgctaatatattgatcataatcctgtgcataaattaagatacaacaatgtctcgaaatcatcgacatggcttcttccatagttagaagatcgtcgtcaaagttagcaacgtgattcatcaacatttgctgttttgaggcagcaaatactgaaccgtcgccattcaaccattcataaaaaccatcgtctgaatccattgataatttcttgtactggtttttgagagctcgcatcaatctagcatttctagctcccggattgaaaacagaaagaggatcgtacatccagggtccattttctgtaaatagaatcgtataatgtcccttcaagaagatatcagacgatccacaatcaaagaattggtctccgagtttgtaacaaactgcggactttaacctatacatgataccgtttagcataatttctggtgatacgtcaatcggagtatcatctattagagatctaaagccggtgtaacattctccaccaaacatattcttattctgacgtcgttctacataaaacatcattgctccattaacgataacaggggaatgaacagcactacccatcacattagttcccaatggatcaatgtgtgtaactccagaacatcttccatagcctatgttaggaggagcgaacaccactcttccactattgccatcgaatgccatagaataaatatccttggaattgatagaaatcggactgtcggatgttgtgatcatcttcataggattaacaactatgtatggtgccgcctgaagtttcatatcgtaactgatgccgtttataggtctagccacagaaaccaacgtaggtctaaatccaactatagacaaaatagaagccaatatctgttcctcatctgtcataacttgagagcatccagtatgaataatcttcattagatggggatctaccgcatcatcatcgttacaataaaaaattcccattctaatgttcataattgcttttctaatcatggtatgcatgtttgctctctgaatctctgtggaaattagatctgatacacctgtaatcactatcggattatcctccgtaagacgattaaccaacaacatataattataagactttacttttctaaattcataaagttgctggattaggctataggtgtctccatgtacatacgcgttctcgagcgcaggaagtttaataccgaatagtgccatcagaataggatgaatatagtaattagtttctggttttctataaataaaagacaaatcttgtgaactagacatatcggtaaaatgcatggattggaatcgtgtagtcgacagaagaatatgatgattagatggagagtatattttatctaactctttgagttggtcaccgattctaggactagctcgagaatgaataagtactaaaggatgagtacatttcacagaaacactagcattgttcaatgtgctctttacatgggtaaggagttgaaatagctcgtttctatttgttctgacaatatttagtttattcataatgttaagcatatcctgaatagtaaagttagatgtgtcatacttgttagtagttagatatttagcaattgcattcccatcatttctcaatctcgtactccaatcatgcgtggatgctacttcgtcgatggaaaccatacaatcctttttgataggctgttgagattgatcatttcctgcacgtttaggtttggtacgttgatttctagcccctgcggatataaagtcatcgtctacaatttgggacaatgaattgcatacactacaagacaaagatttatcagaagtgtgaatatgatcttcatctaccaaagaaagagtttgattagtataactagattttagtcctgcgttagatgttaaaaaaacatcgctattgaccacggcttccattatttatattcgtagtttttactcgaaagcgtgattttaatatccaatcttattacttttggaatcgttcaaaacctttgactagttgtagaatttgatctattgccctacgcgtatactcccttgcatcatatacgttcgtcaccagatcgtttgtttcggcctgaagttggtgcatatctctttcaacattcgacatgagatccttaagggccatatcgtctagattttgttgagatgctgctcctggatttggattttgttgtgctgttgtacatactgtaccaccagtaggtgtaggagtacatacagtggccacaataggaggttgagaaagtgtaaccgttggagtagtacaagaaatacttccatccgattgttgtgtacatgtagttgttggtaacgtctgagaaggttgggtagatggcggcgtcgtcgttttttgatctttattaaatttagagataatatcctgaacagcattgctcggcgtcaacgctggaaggagtgaactcgccggcgcatcagtatcttcagacagccaatcaaaaagattagacatatcagatgatgtattagtttgttgtcgtggttttggtgtaggagcagtactactaggtagaagaataggagccgatgtagctgttggaaccggctgtggagttatatgaatagttggttgtagcggttggataggctgtctgctggcggccatcatattatctctagctagttgttctcgcaactgtctttgataatacgactcttgagactttagtcctatttcaatcgcttcatcctttttcgtatccggatccttttcttcagaataatagattgacgactttggtgtagaggattctgccagcctctgtgagaacttgttaaagaagtccatttaaggctttaaaattgaattgcgattataagattaaatggcagacacagacgatattatcgactatgaatccgatgatctcaccgaatacgaggatgatgaagaagaggaagaagatggagagtcactagaaactagtgatatagatcccaaatcttcttataagattgtagaatcagcatccactcatatagaagatgcgcattccaatcttaaacatatagggaatcatatatctgctcttaaacgacgctatactagacgtataagtctatttgaaatagcgggtataatagcagaaagctataacttgcttcaacgaggaagattacctctagtttcagaattttctgacgaaacgatgaagcaaaatatgctacatgtaattatacaagagatagaggagggttcttgtcctatagtcatcgaaaagaacggagaattgttgtcggtaaacgattttgacaaagatggtctaaaattccatctagactatattatcaaaatttggaaacttcaaaaacgatattagaatttatacgaatatcgttctctaaatgtcacaatcaagtctcgcatgttcagcaatttattgtcgtactttatatcgtgttcattaacgatatcttgcaaaatagtaatgattctatcttccttcgatagatattcttcagagattattgtcttatattctttcttgttatcagatatgaatttgataagactttgaacattattgatacccgtctgtttaattttttctacagatattttagttttggcagattctatcgtatctgtcaatagacatccaacatcgacattcgacgtcaattgtctataaatcaacgtataaattttagaaataacattagcgaattgttgtgcgttgatgtcgttattctgaaacagtatgattttaggtagcattttcttaacaaagagaacgtatttattgttactcagttgaacagatgatatatccagattactaacgcatctgattccgtataccaaactttcagaagaaatggtatacaattgtttgtattcattcaatgtctctttttcagaaattagtttagagtcgaatactgcaataattttcaagagatagttttcatcagataagattttatttagtgtagatatgataaaactattgttttgttggagaacttgatacgccgcgttctctgtagtcgacgctctcaaatgggaaacaatctccattatttttttggaatcggatactatatcttcggtatcttgacgcagtctagtatacatagagttaagagagattagagtttgtacattaagcaacatgtctctaaatgtggctacaaacttttcctttttcacatcatctagtttattatataccgatttcacaacggcaccagatttaaggaaccagaatgaaaaactctgataactacaatatttcatcatagttacgattttatcatcttctatagttggtgtaatagcgcatacctttttctccaagactggaaccaacgtcataaaaatgtttaaatcaaaatccatatcaacatctgatgcgctaagaccagtctcgcgttcaagattatctttactaatggtgacgaactcatcgtataaaactctaagtttgtccattatttatttacagatttagttgtttaatttatttgtgctcttccagagttgggatagtatttttctaacgtcggtattatattattaggatctacgttcatatgtatcataatattaatcatccacgttttgataaatctatctttagcttctgaaataacgtatttaaacaaaggagaaaaatatttagctacggcatcagacgcaataacattttttgtaaatgtaacgtatttagacgacagatcttcgttaaaaagttttccatctatgtagaatccatcggttgttaacaccattcccgcgtcagattgaataggagtttgaatagtttgttttggaaatagatccttcaataacttatagttgggtgggaaaaaatcgattttatcactagactctttcttttttactatcattacctcatgaactatttcttgaatgagtatatgtattttctttcctatatcggacgcgttcattggaaaatataccatgtcgttaactataagaatatttttatcctcgtttacaaactgaataatatcagatgtagttcgtaaacgaactatatcatcaccagcacaacatctaactatatgatatccactagtttcctttagccgtttattatcttgttccatattagcagtcattccatcatttaagaaggcgtcaaaaataatagggagaaatgacattttggattctgttacaactttaccaaaattaaggatatacggacttactatctttttctcaacgtcaatttgatgaacacacgatgaaaatgtgcttctatgagattgatcatgtagaaaacaacaagggatacaatatttccgcatatcatgaaatatattaagaaatcccaccttattatatttccccaaaggatccatgcacgtaaacattatgccgttatcattaataaagacttctttctcatcggatctgtaaaagttgttactgatttttttcattccaggatctagataattaataatgatgggttttctattcttattctttgtattttggcatatcctagaccagtaaacagtttccactttggtaaaatcagcagacttttgaacgctattaaacatggcattaatggcaataactaaaaatgtaaaatatttttctatgttaggaatatggtttttcactttaatagatatatggtttttggccaaaatgatagatatttttttatccgaggatagtaaaatattattagtcgccgtctctataaaaatgaagctagtctcgatatccaattttattctagaattgataggagtcgccaaatgtaccttatacgttatatctcccttgatgcgttccatttgtgtatctatatcggacacaagatctgtaaatagttttacgttattaatcatcacggtatcgccgtcgctagataacgctaatgtaccatccaagtcccaaatggagagatttaactgttcatcgtttagaataaaatgattaccggtcatattaataaagtgttcatcgtatctagataacaacgacttataattaatgtccaagtcttgaactcgctgaatgatcttttttaacccagttagttttagattggtacgaaatatattgttaaactttgattctacagtaatgtccaaatctagttgtggaaatacttccatcaacattgtttcaaacttgataatattattatctacatcttcgtacgatccaaattccggaatagatgtatcgcacgctctggccacccagataaccaaaaagtcacacgctccaggatatacattgtataaaaagctatcgttttttagtagggtttttttctgcgtgtatacgaagggattaaaaatagtattatcaacgtaactatattccaaattattcttatgagaatagataataatatcgtccttaatatctaacaaatttcctaaatatccctttaattgagtcattcgaagcgtcaatagaatatgtctcttaactatttccggctgttgtatatttaaatgacttcgtaaaaaataatatatgggcgacttctcatctatgtaatcatatggagtgagatatagggctcgttctacctcctgccccttacccacctgtaataccaattgcggacttactatatatcgcatatttatatcgtggggtaaagtgaaaatctactaccgatgatgtaagtcttacaatgttcgaaccagtaccagatcttaatttggaggcctccgtagaactaggggaggtaaatatagatcaaacaacacctatgataaaggagaatagcggttttatatcccgcagtagacgtctattcgcccatagatctaaggatgatgagagaaaactagcactacgattctttttacaaagactttattttttagatcatagagagattcattatttgttcagatgcgttgacgctgtaaaagacgtcactattaccaaaaaaaataacattatcgtggcgccttatatagcacttttaactatcgcatcaaaaggatgcaaacttacagaaacaatgattgaagcattctttccagaactatataatgaacatagtaagaaatttaaattcaactctcaagtatccatcatccaagaaaaactcggataccagtttggaaactatcacgtttatgattttgaaccgtattactctacagtagctctggctattcgagatgaacattcatctggcatttttaatatccgtcaagagagttatctggtaagttcattatctgaaataacatatagattttatctaattaatctaaaatctgatcttgttcaatggagtgctagtacgggcgctgtaattaatcaaatggtaaatactgtattgattacagtgtatgaaaagttacaactggtcatagaaaatgattcacaatttacatgttcattggctgtggaatcaaaacttccaataaaattacttaaagatagaaatgaattatttacaaaattcattaacgagttaaaaaagaccagttcattcaagataagcaaacgcgataaggatacgctactaaaatattttacttaggactggagttagaatttatagacgactcatttcgtttatcattgttactattattactattactatcattattagtgttggcattattagtattcttcttgtcatcttgttcagaaatatacagcaatgctatacctaatactaaatacattatcatgctcgcaatggctctaacaacaacgaaccaaaatgaatttggtcgtagcttttgttcacaaaaatacataaagaaatgtctacataaatctatggcgccattggctacttgaaatagcgccagtcctcctacagattttaatatagctgtataacatgacatttattcatcatcaaaagagacagagtcaccatctgtcatatttagattttttttcatgtgttcaaagtatcctctactcatttcattataatagtttatcatacttagaattttaggacggatcaatgagtaagacttgactagatcgtcagtagtaatttgtgcatcgtctattctgcatccgcttcgtcgaataatgtatagcatcgctttgagattctccatagctatcaagtctttatacaatgacatggaaatatctgtgaatactttatacttctccaacatcgatgccttaacatcatcgcctactttagcattgaaaatacgttctattgtgtagatggatgtagcaagatttttaaacaacaatgccatcttacacgatgattgcctcaagtctccaatcgtttgtttagaacgattagctacagagtccaatgcttggctgactagcatattattatctttagaaattgtattcttcaatgaggcgtttatcatatctgtgatttcgttagtcatattacagtctgactgggttgtaatgttatccaacatatcacctatggatacggtacacgtaccagcatttgtaataatcctatctaagatgttgtatggcattgcgcagaaaatatcttctcctgtaatatctccactctcgataaatctactcagattattcttaaatgccttattctctggagaaaagatatcagtgtccatcatttcattaatagtatacgcagaaaagataccacgagtatcaattctatccaagatacttatcggttccgagtcacagataatggtttcctctccttcgggagatcctgcatagaaatatctaggacaatagtttctatactgtctgtaactctgataatctctaaagtcactaactgataccatgaaattgagaagatcaaacgctgaagtaattaatttttctgcctcgtttttactacaactagttttcatcaatgtagtgacgatgtattgtttagttacttttggtctaatactgatgatagagatattattgcttcccataatggatcttctagtagtcaccttaaagcccattgatgcgaatagcagatagataaagtcttggtatgactcctttctaatatagtacggactacctttgtcacccaactttatacccacataagccataacaacctctttaatagccgtttcatgaggtttatcagccatgagcctgagtagttggaagaatctcatgaatcccgtctcagaaagtcctatatgcatgatagatttatctttcctgggaaactctcgtatagtcatagatgaaatactctttaaagtttctgaaataagattagtaacagtcttacctccgactactctaggtaacaaacaaactctaataggtgttttctctgcggagataatatcagaaaggatagagcaataagtagtattattgtgattataaagaccgaatacataacaggtagaatttataaacatcatgtcctgaaggtttttagacttgtattcctcgtaatccataccgtcccaaaacatggatttggtaactttgatagccgtagatctttgttccttcgccaacaggttaaagaaattaataaagaatttgttgtttctatttatgtccacaaattgcacgtttggaagcgccacggttacattcactgcagcattttgaggatcgcgagtatgaagtacgatgttattgtttactggtatatctggaaagaaatctaccagtctaggaataagagattgatatcgcatagaaatagtaaagtttataatctcatcatcgaagagcattttgttaccattgtaataaatatccactctgtcatatgtataaatgaagtactgttcaaacatgatgagatgtttatatgttggcatagtagtgagatcgacgtttggtaatggcaatgtattaagattaactccataatgtctagcagcatctgcgatgttataagcgtcgtcaaagcggggtcgatcttgtattgttatatattgtctaacacctataagattatcaaaatcttgtctgcttaatacaccgttaacaatttttgccttgaattcttttattggtgcattaataacatccttatagaggatgttaaacaaataagtgttatcaaagttaagatctggatatttcttttctgctagaacatccattgagtcggagccatctggtttaatataaccaccgataaatctagctctgtattctgtatccgtcaatctaatattaagaaggtgttgagtgaaaggtggaagatcgtaaaagctgtgagtattaatgataggattagtttccgaactaatgttaattggggtattaataatatctatatttccagcgttaagtgtaacattaaacagttttaattcacgtgacgtggtatcaattaaataattaatgcccaatttggatatagcagcctgaagctcatcttgtttagttacggatcctaatgagttattaagcaatatatcgaacggatgaacgaaggttgttttaagttggtcacatactttgtaatctagacatagatgcggaagaacggtagaaactatacgaaataaatattcagagtcctctaattgatcaagagtaactattgacttaataggcatcatttatttagtattaaatgacgaccgtaccagtgacggatatacaaaacgatttaattacagagttttcagaagataattatccatctaacaaaaattatgaaataactcttcgtcaaatgtctattctaactcacgttaacaacgtggtagatagagaacataatgccgccgtagtgtcatctccagaggaaatatcctcacaacttaatgaagatctatttccagatgatgattcaccggccactattatcgaacgagtacaacctcatactactattattgacgatactccacctcctacgtttcgtagagagttattaatatcggaacaacgtcaacaacgagaaaaaagatttaatattacagtatcgaaaaatgctgaagcaataatggaatctagatctatgataacttctatgccaacacaaacaccatccttgggagtagtttatgataaagataaaagaattcagatgttagaggatgaagtggttaatcttagaaatcaacgatctaatacaaaatcatctgataatttagataattttaccaaaatactatttggtaagactccgtacaaatcaacagaagttaataagcgtatagccatcgttaattatgcaaatttgaacgggtcccccttatcagtcgaggacttggatgtttgttcggaggatgaaatagatagaatctataaaacgattaaacaatatcacgaaagtagaaaacgaaaaattatcgtcactaacgtgattattattgtcataaacattatcgagcaggcattgctaaaactcggatttgaagaaatcaaaggactgagtaccgatatcacttcagaaattatcgatgtggagatcggagatgactgcgatgctgtagcatctaaactaggaatcggtaacagtccggttcttaatattgtattgtttatactcaagatattcgttaaacgaattaaaattatttaatttaatacattcccatatccagacaacaatcgtctggattaatctgttcctgtcgtctcataccggacgacatattaatctttttattagtgggcatctttttagatggtttctttttcccagcattaactgagtcgatacctagaagatcgtgattgatctctccgaccattccacgaacttctaattggccgtctctgacggtaccataaactattttaccagcattagtaacagcttggacaatctgaccatccatcgcattgtacgatgtagtagtaactgttgttctacgtctaggagcaccagaagtatttttggagcccttggatgttgatgtagaagaagacgaggattttgattttggtttacatgtaatacattttgaactctttgattttgtatcacatgcgccggcagtcacatctgtttgagaattaagattattgttgcctcctttgacggctgcatctccaccgatttgcgctagtagatttttaagctgtggtgtaatcttattaactgtttcgatataatcatcgtaactgcttctaacggctaaattttttttatccgccatttagaagctaaaaatatttttatttatgcagaagatttaactagattatacaatgaactaatatgatccttttccagattatttacaaacttggtattttttggttctggaggaggcgaatttaaattcggacttggattcggattttgtaagttcttgatcttattatacatcgagtataggatggcgacagtaactgctacacaaataccgatcaaaagaagaataccaatcatttattgacaataacttcactattgatcaagtatgcaatatatcatcttttcactaaataagtagtaataatgattcaacaatgtcgagatatatggacgataataatttagttcatggaaatatcgctatgattggtgtgaatgactccgctaactctgtggggtgcgcagtgctttccccacatagaataaattagcattccgactgtgataataataccaagtataaacgccataatactcaatactttccatgtacgagtgggactggtagacttactaaagtcaataaaggcgaagatacacgaaagaatcaaaagaatgattccagcgattagcacgccggaaaaataatttccaatcataagcatcatgtccatttaactaataaaaattttaaatcgccgaatgaacaaagtggaatataaaccatataaaaacaatagtttgtactgcaaaaataatatctatttttgttttcgaagatatggtaaaattaaatagtagtacacagcatgttataactaacagcagcaacggctcgtaattacttatcatttactagacgaaaaggtggtgggatattttcttgctcaaataatacgaatatatcacccatccattttatgcgatgtttatatactctaatctttaatagatctatagacgacgggtttaccaacaatatagattttatcgattcatctaatttaaacccttccttaaacgtgaatgatctattatctggcataacgatgaccctacctgatgaatcggacaatgtactgggccatgtagaataaattatcaacgaattatcgtctacgaacatttatatcatttgttttaattttaggacgcgaataaatggatataaaatagaaaataacagatattacaaccagtgttatggccgcgcccaaccaggtaggcagttttattttatcttttactacaggttctcctggatgtacgtcaccaacggcggacgtagttctagtacaattagacgtaagttccgcttgggaattttttaacgctaaagagttaacgttaatcgtgcacccaacgtatttacatctagttcgttgaacatcttgattataatataaccattttctatctctagattcgtcagtgcactcatgtaaccaacataccctaggtcctaaatatttatctccggaattagattttggataattcgcgcaccaacaatttctatttcctttatgatcgttacaaaagacgtataatgccgtatccccaaaagtaaaataatcaggacgaataattctaataaactcagaacaatatctcgcatccatatgtttggagcaaatatcggaataagtagacatagccggtttccgttttgcacgtaaccattctaaacaattggggtttccaggatcgtttctacaaaatccagtcatgaaatcgtcacaatgttctgtcttgtaattattattaaatatttttggacagtgtttggtatttgtcttagaacaacattttgccacgctatcactatcgcccaggagataatccttttttataaaatgacatcgttgcccggatgctatataatcagtagcgtgttttaaatccttaatatattcaggagttacctcgttctgataatagattaatgatccaggacgaaatttgaaagaactacatggttctccatgaattaatacatattgtttagcaaattcaggaactataaaactactacaatgatctatcgacataccatctatcaaacaaaacttgggtttaatttctcccggagatgtttcataatagtacgtataactttcttctgcaaacttaacagctctattatattcaggataattaaaacctaattccatatatttgtctcgtatatctgctattcctggtgctattttgattctattaagagtaacagctgcccccattcttaataatcgtcagtatttaaactgttaaatgttggtatatcaacatctaccttatttcccgcagtataaggtttgttgcaggtatactgttcaggaatggttacatttatacttcttctatagtcctgtctttcgatgttcatcacatatgcaaagaacagaataaacaaaataatgtaagaaataatattaaatatctgtgaattcgtaaatacattgattgccataataattacagcagctacaatacacacaatagacattcccacagtgttgccattacctccacgatacatttgagttactaagcaataggtaataactaagctagtaagaggcaatagaaaagatgagataaatatcatcaatatagagattagaggagggctatatagagccaagacgaacaaaatcaaaccgagtaacgttctaacatcattatttttgaagattcccaaataatcattcattcctccataatcgttttgcatcatacctccatctttaggcataaacgattgctgctgttcctctgtaaataaatctttatcaagcactccagcacccgcagagaagtcgtcaagcatattgtaatatcttaaataactcatttatatattaaaaaatgtcactattaaagatggagtataatctttatgccgaactaaaaaaaatgacttgtggtcaacccctaagtctttttaacgaagacggggatttcgtagaagttgaaccgggatcatcctttaagtttctgatacctaagggattttacgcctctccttccgtaaagacgagtctagtattcgagacattaacaacgaccgataataaaatcactagtatcaatccaacaaatgcgccaaagttatatcctcttcaacgcaaagtcgtatctgaagtagtttctaatatgaggaaaatgatcgaatcaaaacgtcctctatacatcactcttcacttggcgtgtggatttggtaagactattaccacgtgttatcttatggctacacacggtagaaaaaccgtcatttgcgtacccaataaaatgttaatacatcaatggaagacacaggtagaggcagtcggattggaacataagatatccatagatggagtaagtagtctattaaaggaactaaagactcaaagtccggatgtattaatagtagtcagtagacatctgacaaacgatgccttttgtaaatatatcaataagcattatgatttgttcatcttggatgaatcacatacgtataatctgatgaacaatacagcagttacaagatttttagcgtattatcctccgatgatgtgttattttttaactgctacacctagaccatctaaccgaatttattgtaacagtattattaatattgccaagttatccaatctaaaaaaaactatctatgcagtagatagtttttttgagccatattccacagataatattagacatatggtaaaacgactagatggaccatctaataaatatcatatatataccgagaagttattatctgtagacgagcctagaaatcaacttattcttgataccctggtagaagaattcaagtcaggaactattaatcgcattttagttattactaaactacgtgaacatatggtattattctacaaacgattattagattttttcggaccagaggttgtatttataggagacgcccaaaatagacgtactccagatatggtcaaatcaatcaaggaactaaatagatttatattcgtatccaccttattttattccggtactggtttagatattcctagtttggattcgttgttcatttgctcggcagtaatcaacaatatgcaaatagagcaattactagggagggtatgtcgagaaacagaactattagataggacggtatatgtatttcctaacacatccatcaaagaaataaagtacatgataggaaatttcatgcaacgaattattagtctgtctgtagataaactaggatttaaacaaaaaagttatcggaaacatcaagaatccgatcccacttctgcatgtacaacatcatccagagaagaacgtgtattaaatagaatatttaactcgcaaaatcgttaagaagtttaagcgacgatccgcatgctgcgcaggccagtgtattacccctcatagtattaatataatccaatgatacttttgtgatgtcggaaatcttaaccaatttagactgacaggcagaacacgtcatgcaatcatcatcgtcatcgataactgtagtcttgggcttctttttgcgactcttcattccggaacgcacattggtgctatccatttaggtagtaaaaaataagtcagaatatgccctataacacgatcgtgcaaaacctggtatatcgtctctatctttatcacaatatagtgtatcgacatttttattattattgacctcgtttatcttggaacatggaatgggaacatttttgttatcaacggccatctttgccttaattccagatgttgtaaaattataactaaacagtctatcatcgacacaaatgaaattcttgtttagacgtttgtagtttacgtatgcggctcgttcgcgtctcattttttcagatattgcaggtactataatattaaaaataagaatgaaataacataggattaaaaataaagttatcatgacttctagcgctgatttaactaacttaaaagaattacttagtctgtacaaaagtttgagattttcagattctgcggctatagaaaagtataattctttggtagaatggggaacatctacttactggaaaataggcgtgcaaaaggtagctaatgtcgagacgtcaatatctgattattatgatgaggtaaaaaataaaccgtttaatattgatccgggctattacattttcttaccggtatattttgggagcgtctttatttattcgaagggtaaaaatatggtagaacttggatctggaaactcttttcaaataccagatgatatgcgaagtgcgtgtaacaaagtattagacagcgataacggaatagactttctgagatttgttttgttaaacaatagatggataatggaagatgctatatcaaaatatcagtctccagttaatatatttaaactagctagtgagtacggattaaacatacccaaatatttagaaattgaaatagaggaagacacattatttgacgacgagttatactctattatagaacgctctttcgatgataaatttccaaaaatatccatatcgtatattaagttgggagaacttagacggcaagttgtagactttttcaaattctcattcatgtatattgagtccatcaaggtagatcgtataggagataatatttttattcctagcgttataacaaaatcaggaaaaaagatattagtaaaagatgtagaccatttaatacgatccaaggttagagaacatacatttgtaaaagtaaaaaagaaaaacacattttccattttatacgactatgatggaaacggaacagaaactagaggagaagtaataaaacgaattatagacactataggacgagactattatgttaacggaaagtatttctctaaggttggtagtgcaggcttaaagcaattgactaataaattagatattaatgagtgcgcaactgtcgatgagttagttgatgagattaataaatccggaactgtaaaacgaaaaataaaaaaccaatcagcatttgatttaagcagagaatgtttgggatatccagaagcggattttataacgttagttaataacatgcggttcaaaatagaaaattgtaaggttgtaaatttcaatattgaaaatactaattgtttaaataacccgagtattgaaactatatatggaaactttaaccagttcgtctcaatctttaatgtcgtcaccgatgtcaaaaaaagattattcgagtgaaataatatgcgcctttgatataggtgcaaaaaatcctgccagaactgttttagaagtcaaggataactccgttagggtattggatatatcaaaattagactggagttctgattgggaaaggcgcatagctaaagatttgtcacaatatgaatacactacagttcttctagaacgtcagcctagaaggtcgccgtatgttaaatttatctattttattaaaggctttttatatcatacatcggctgccaaagttatttgcgtctcgcctgtcatgtctggtaattcatatagagatcgaaaaaagagatcggtcgaagcatttcttgattggatggacacattcggattgcgagactccgttccggatagacgcaaattagacgatgtagcggatagtttcaatttggctatgagatacgtattagataaatggaatactaattatacaccttataataggtgtaaatctagaaattacataaaaaaaatgtaataacgttagtaacgccattatggataatctatttacctttctacatgaaatagaagatagatatgccagaactatttttaactttcatctaataagttgcgatgaaataggagatatatatggtcttatgaaagaacgcatttcctcagaggatatgtttgataatatagtgtataataaagatatacatcctgccattaagaaactagtgtattgcgacatccaacttactaaacacattattaatcagaatacgtatccggtatttaacgattcttcacaagtgaaatgttgtcattatttcgacataaactcagataatagcaatattagctctcgtacagtagagatatttgagagggaaaagtcatctcttgtatcatatattaaaactaccaataagaagagaaaggtcaattacggcgaaataaagaaaactgttcatggaggcactaatgcaaattacttttccggtaaaaagtctgacgagtatctgagtactacagttagatccaacattaatcaaccttggatcaaaaccatctctaagaggatgagagttgatatcattaatcactctatagtaacgcgtggaaaaagctctatattacaaactatagaaattatttttactaatagaacatgtgtgaaaatattcaaggattctactatgcacattattctatccaaggacaaggatgaaaaggggtgtatacacatgattgacaaattattctatgtctattataatttatttctgttgttcgaagatatcatccaaaacgagtactttaaagaagtagctaatgttgtaaaccacgtactcacggctacggcattagatgagaaattattcctaattaagaaaatggctgaacacgatgtttatggagttagcaatttcaaaatagggatgtttaacctgacatttattaagtcgttggatcataccgttttcccctctctgttagatgaggatagcaaaataaagttttttaaggggaaaaagctcaatattgtagcattacgatctctggaggattgtataaattacgtgactaaatccgagaatatgatagaaatgatgaaggaaagatcgactattttaaatagcatagatatagaaacggaatcggtagatcgtctaaaagaattgcttctaaaatgaaaaaaaacactaattcagaaatggatcaacgactagggtataagtttttggtgcctgatcctaaagccggagttttttatagaccgttacatttccaatatgtatcgtattctaattttatattgcatcgattgcatgaaatcttgaccgtcaagcggccactcttatcgtttaagaataatacagaacgaattatgatagaaattagcaatgttaaagtgactcctccagattactcacctataatcgcgagtattaaaggtaagagttatgacgcattagccacgttcactgtaaatatctttaaagaggtaatgaccaaagagggtatatccatcactaaaataagtagttatgagggaaaagattctcatttgataaaaattccgctactaataggatacgggaataaaaatccacttgatacagccaagtatcttgttcctaatgtcataggtggagtctttatcaataaacaatctgtcgaaaaagtaggaattaatctagtagaaaagattacaacatggccaaaatttagggttgttaagccaaactcattcactttctcgttttcctccgtatcccctcctaatgtattaccgacaagatatcgccattacaagatatctctggatatatcacaattggaagcgttgaatatatcatcgacaaagacatttataacggtcaatattgttttgctgtctcaatatttatctagagtgagtctagaattcattagacgtagtttatcatacgatatgcctccagaagttgtctatctagtaaacgcgataatagatagtgctaaacgaattactgaatctattactgactttaatattgatacatacattaatgacctggtggaagctgaacacattaaacaaaaatctcagttaacgatcaacgagttcaaatatgaaatgctgcataactttttacctcatatgaactatacacccgatcaactaaagggattttatatgatatctttactaagaaagtttctctactgtatcttccacacttctagatatccagatagagattcgatggtttgtcatcgcatcctaacgtacggcaaatattttgagacgttggcacatgatgaattagagaattacataggcaacatccgaaacgatatcatgaacaatcacaagaacagaggcacttacgcggtaaacattcatgtactaacaactcccggacttaatcacgcgttttctagcttattgagtggaaagttcaaaaagtcagacggtagttatcgaacacatcctcactattcatggatgcagaatatttctattcctaggagtgttggattttatccggatcaagtaaagatttcaaagatgttttctgtcagaaaataccatccaagtcaatatctttacttttgttcatcagacgttccggaaagaggtcctcaggtaggtttagtatctcaattgtctgtcttgagttccattacaaatatactaacgtctgagtatttggatttggaaaagaaaatttgtgagtatatcagatcatattataaagatgatataagttactttgaaacaggatttccaatcactatagaaaatgctctagtcgcatctcttaatccaaatatgatatgtgattttgtaactgactttagacgtagaaaacggatgggattcttcggtaacttggaggtaggtattactttagttagggatcacatgaatgaaattcgcattaatattggagcgggaagattagtcagaccattcttggttgtggataacggagagctcatgatggatgtgtgtccggagttagaaagcagattagacgacatgacattctctgacattcagaaagagtttccgcatgtcatcgaaatggtagatatagaacaatttacttttagtaacgtatgtgaatcggttcaaaaatttagaatgatgtcaaaggatgaaagaaagcaatacgatttatgtgactttcctgccgaatttagagatggatatgtagcatcttcattagtgggaatcaatcacaattctggacccagagctattcttggatgtgctcaagctaaacaagctatctcttgtctgagctcggatatacgaaataaaatagacaatggaattcatttgatgtatccagagaggccaatcgtgattagtaaggctttagaaacttcaaagattgcggctaattgcttcggccaacatgttactatagcattaatgtcgtacaaaggtatcaatcaagaggatggaattatcatcaaaaaacaatttattcagagaggcggtctcgatattgttacagccaagaaacatcaagtagaaattccattggaaaactttaataacaaagaaagagataggtctaacgcctattcaaaattagaaagtaatggattagttagactgaatgctttcttggaatccggagacgctatggcacgaaatatctcatcaagaactcttgaagatgattttgctagagataatcagattagcttcgatgtttccgagaaatataccgatatgtacaaatctcgcgttgaacgagtacaagtagaacttactgacaaagttaaggtacgagtattaaccatgaaagaaagaagacccattctaggagacaaatttaccactagaacgagtcaaaagggaacagtcgcgtatgtcgcggatgaaacggaacttccatacgacgaaaatggtatcacaccagatgtcattattaattctacatccatcttctctagaaaaactatatctatgttgatagaagttattttaacagccgcatattctgctaagccgtacaacaataagggagaaaaccgacctgtctgttttcctagtagtaacgaaacatccatcgatacatatatgcaattcgctaaacaatgttatgagcattcaaatccgaaattgtccgatgaagaattatcggataaaatcttttgtgaaaagattctctatgatcctgaaacggataagccttatgcatccaaagtattttttggaccaatttattacttgcgtctgaggcatttaactcaggacaaggcaaccgttagatgtagaggtaaaaagacgaagctcattagacaggcgaatgagggacgaaaacgtggaggaggtatcaagttcggagaaatggagagagactgtttaatagcgcatggtgcagccaatactattacagaagttttgaaagattcggaagaagattatcaagatgtgtatgtttgtgaaaattgtggagacatagcagcacaaatcaagggtattaatacatgtcttagatgttcaaaacttaatctctctcctctcttaacaaaaattgataccacgcacgtatctaaagtatttcttactcaaatgaacgccagaggcgtaaaagtcaaattagatttcgaacgaaggcctccttcgttttataaaccattagataaagttgatctcaagccgtcttttctggtgtaatattctagtttggtagtagatacatatcaatatcatcaaattcgagatccgaattataaaatgggcgtggattgttaactatagaatcggacgtctgatattcgaaaatctgtggagtttcaggttttggtggaggtgtaactgctacttgggatactgaagtctgatattcagaaagctgtggatgttctggttcggcatccaccgatggtgtcacatcactaatcggttcggtaacgtctgtggatggaggtgctacttctacagaacctgtagcctcagttgtcaacggagatacatttttaatgcgagaaaatgtataatttggtaatggtttcttatgtggatctgaagaagaggtaagatatctactagaaagataccgatcacgttctagttctcttttgtagaacttaactttttctttctccgcatctagttgatattccaacctcttcacgttactacgttcagattccaattcacgttcgcatgggttacctccgcagtttttacgagcgatttcacgttcagccttcatgcgtctctccctctctctatcgagtttatcagagcagtctttctgaaggcgatcgaactccataaatttctccaacgctttgattgtttccatagatttccgaagttcagcttttaggactgtgattctttttctttcgaattcacagctggatgtacaaccgtttccattaccgccatctctaagtttcttttctagatcggcaacatttcatccccatgccttttacattcctcgagtctactgtcgtcgaaatatcgttccagctccttttcgacatcaataactttagcacgttgtctctcaagctctcttttgtagttatctgattccctggcacgtttaagatcttcatgcaattgagtcagctcttaacttcctctcttgcttcttcgtcatagtacgcgcaatcactgtgagatccattgttaccacgtctacactcggcgagctcgcgtttaagagattcaatttcccgtttgtattggtccatgtttccattgctaccaccattagatttacaggctgctagttgtcgttcgagatcagaaatacgggttttcttggaattgatttcgtcgatgtacttggcatcgaaacacttattaagttctttttccaattctacgattttatttctttcgcgagtcaattccctcctgtagtaactatctgttttgtcagattcacgctctctacgtagactttcttgcaagttactaatttgttccctagcacgtccgagtttagttttatatgctgaatagagttctgattcatcctttgagcagatctctagcgatcgtttaagattcctaattctagtctttagcctatttacctcctcagaagatgttccgttaccgttgcgtttacactcgttaagctgtctatcaagatccatgattctatctctaagacgttgcatctctctttccatatcagcattgctttcattattacgtctgcagtcactcaactgtctttcaatatctgagattctatctctaagacgtcgcatctctctctgtttcggcattggtttcattattacgtttacagtcgttcaactgtctttcaagatctgatattctagattggagtctgctaatctctgtagcattttcacggcattcactcagttgtctttcaagatctgaaattttagattggagtctgctaatctctgtaagatttcctcctccgctctcgatgcagtcggtcaacttattctctagttctctaatacgcgaacgcagtgcatcaacttcttgcgtgtcttcctggttgcgtgtacattcatcgagatctctaacgcgtcgtcgttcttcctcaagttctctgcgtactacagaaagcgtgtccctatcttgttgatatttagcaatttctgattctagagtactgattttgcttacgtagttactaatagttgtcttggccttatcaagatcctccttgtatttgtcgcattccttgatatccctacgaagtctggacagttcccattcgacattacgacgtttatcgatttcagctcggagatcgtcatcgcgttgttttagccacatacgactgagttcaagttctcgttgacaagatccatctacttttccattcctaatagtatccagttccttttctagttctgaacgcatttctcgttccctatcaagcgattctctcaattctcggatagtcttcttatcaatttctaataaatctgaaccatcatctgtcccattttgaatatccctgtgttctttgatctcttttgtaagtcggtcgattctttcggttttataaacagaatccctttccaaagtcctaatcttactgagtttatcactaagttctgcattcaattcggtgagttttctcttggcttcttccaactctgttttaaactctccactatttccgcattcttcctcgcatttatctaaccattcaattagtttattaataactagttggtaatcagcgattcctatagccgttcttgtaattgtgggaacataattaggatcttctaatggattgtatggcttgatagcatcatctttatcattattagggggatggacaaccttaattggttggtcctcatctcctccagtagcgtgtggttcttcaataccagtgttagtaataggcttaggcaaatgcttgtcgtacgcgggcacttcctcatccatcaagtatttataatcgggttctacttcagaatattcttttctaagagacgcgacttcgggagttagtagaagaactctgtttctgtatctatcaacgctggaatcaatactcaagttaaggatagcgaatacctcatcgtcatcatccgtatcttctgaaacaccatcatatgacatttcatgaagtctaacgtattgataaatagaatcagatttagtattaaacagatccttaacctttttagtaaacgcatatgtatattttagatctccagatttcataatatgatcacatgccttaaatgtcagtgcttccatgatataatctggaacactaatgggtgacgaaaaagatacagcaccatatgctacgttgataaataaatctgaaccactaagtagataatgattaatgttaagaaagaggaaatattcagtgtataggtatgtcttggcgtcatatcttgtactaaacacgctaaacagtttgttaatgtgatcaatttccaatagattaattagagcagcgggaataccaacaaacatattaccacatccgtattttctatgaatatcacatatcatgttaaaaaatcttgatagaagagcgaatatctcgtctgacttaatgagtcgtagttcagcagcaacataagtcataactgtaaatagaacatactttcctgtagtgttgattctagactccacatcaacaccattattaaaaatagttttatatacatctttaatctgctctccgttaatcgtcgaacgttctagtatacggaaacactttgatttcttatctgtagttaatgacttagtgatatcacgaagaatattacgaattacatttcttgtttttcttgagagacctgattcagaactcaactcatcgttccatagtttttctacctcagtggcgaaatctttggagtgcttggtacatttttcaataaggttcgtgacctccatttattataaaaaatttattcaaaacttaactacaatcgggtaattataagatcgtagatctcccatgtggcggaatactaccatctatcgcatgtggatggacagtaggtaatggccatgggaacagtaatgtttgcatatttatctttcttgctagtattactgcatattgtcccaatgtttcgatgtgatgttctaacctatcaactgccgctgtatcacaacaatagtgtccgatgaaattaagattatgatccaatgtgtttaatatatgattatcaagtcttatacgatccgcgtcttttttgacaggatcaggttcttctacaggaagaagtttcggcctcttatgatattcatgtctgggaaacggtggtctagggtgaggctccggtatcggagtgggttttggattataatcatcatcgtctatgacatcatcttcgacttcgatatttattttgctatcttgatgatgtcctgtatcagttgcattttcagcactcgactgaatattagcgcattcattgtctattattaccatatttctaaacccaaaatgtatgtgttgaacatcagtactatcgttgatgagtcttatagcatgaattcgcttatcgttatcgggtttatcttctgtcaccttagcaattccttttttattaaactctacataatcatatccatttctattgtttgttctaatataaacgagtatagcatcattgctaaatttttcaatagtatcaaaaacagaatatcctaaaccatataatatatattcaggaacactcaaactaaatgtccaggattctcctaaatacgtaaactttaatagtgcgaaatcattcaaaaatctaccacttatagatagatagtacataaatgcgtatagtagtctacctatctctttattatgaaaaccggcattacgatcatatatgtcgtgatatacctgtgatccgtttacgttaaaccataaatacatgggtgatcctataaacatgaatttatttctaattctcagagctatagttaattgaccgtgtaatatttgcttacatgcatacttgatacgcttattaataagatttttatcattgctcgttatttcagaatcgtatatataaggagtaccatcgtgattcttaccagatattatacaaaatactatatataaaatatattgacccacgttagtaatcatataaatgtttaacgttttaaattttgtattcaatgatccattatcatacgctatcatggtcttgtaatattcattctttaaaatataatattgtgttagccattgcattggagctcctaatggagattttctattctcatccattttaggataggctttcataaagtccctaataacttcgtgaataatgtttctatgttttctactgatgcatgtatttgcttcgatttttttatcccatgtttcatctatcatagatttaaacgcagtaatgctcgcaacattaacatcttgaaccgttggtacaattccgttccataaatttataatgttcgccatttatataactcattttttgaatatacttttaattaacaaaagagttaagttactcatatggacgccgtccagtctgaacatcaatctttttagccagagatatcatagccgctcttagagtttcagcgtgattttccaacctaaatagaacttcatcgttgcgtttacaacacttttctatttgttcaaactttgttgttacattagtaatctttttttccaaattagttagccgttgtttgagagtttcctcattgtcgtcttcatcggctttaacaattgcttcgcgtttagcctctggctttttagcagcctttgtagaaaaaaattcagttgctggaattgcaagatcgtcatctccggggaaaagagttccgtccatttaaagtacagattttagaaactgacactctgcgttatttatatttggtacaacacatggattataaatattgatgttaataacatcagaaaatgtaaagtctatacattgttgcatcgtgttaaattttctaatggatctagtattattgggtccaacttctgcctgaaatccaaatatggaagcggatacaaaaccgtttcctggataaaccacacatctccacttttgctttacatcagaaattgtgtcgttgacatcttgaactctcctatctaatgccggtgttccacctatagattttgaatattcgaatgctgcatgagtagcattaaattccttaatattgccataattttcatatattgagtaaccctggataaaaagtaaacacaccgcagccgtcgctaccacaataaaaaaaattgatagagagttcatttataatctattagaagctgacaaaatttttttacacgcatcagacaatgctttaataaatagttcaacatctacttttgtcatatcgaaccgatggtatgattctaacctagaattacatccgaaaaagttgactatgttcatagtcattaagtcattaacaaacaacattccagactctggattataagacgatactgtttcgtcacaattacctaccttaatcatgtgattatgaatattggctattagagcaccttctaagaaatctataatatctttgaaacacgatttaaaatcaaaccacgaatatacttctacgaagaaagttagtttacccataggagaaataactataaatggagatctaaatacaaaatccggatctatgatagttttaacattattatattctctattaaatacctccacatctaaaaatgttaattttgaaactatgtcttcgtttattaccgtacctgaactaaacgctataagctctattgtttgagaactctttaaacgatattcttgaaatacatgtaacaaagtttcctttaactcggtcggtttatctaccatagttacagaatttgtatccttatctataatataataatcaaaatcgtataaagttatataattatcgcgttcagattgtgatcttttcaaatagactaaaaaccccatttctctagtaagtatcttatgtatatgtttgtaaaatatcttcatggtgggaatatgctctaccgcagttagccattcctcattgacagcggtagatgtattagacaaaactattccaatgtttaacaagggccattttacgagattattaaatccttgtttgataaatgtagccaatgagggttcgagttcaacgacgattgaattctcttcccgcggatgctgcatgatgaacgacgggatgttgttcgattgatttggaattctttttcgactttttgtttatattaaatattttaaaatttatagcggatagcaattcatgtaccacggataatgtagacgcgtattgcgcatcgatatctttattattagataaatttatcaataaatgtgagaagtttgcctcgttaaggtcttccatttaaatattatataaacatttgtgtttgtatcttattcgtcttttatggaatagttttttactagtaaagctgcaattacacactttgtccgtaaaacataaatataaacaccagcttttatcaatcgttccaaaaagtcgacggcggacatttttaacatggcatctattttaaatacacttaggtttttggaaaaaacatcattttataattgtaacgattcaataactaaagaaaagattaagattaaacataagggaatgtcatttgtattttataagccaaagcattctaccgttgttaaatacttgtctggaggaggtatatatcatgatgatttggttgtattggggaaggtaacaattaataatctaaagatgatgctattttacatggatttatcatatcatggagtgacaagtagtggagcaatttacaaattgggatcgtctatcgatagactttctctaaataggactattgttacaaaagttaataattatgatgatacattttttgacgacgatgattgatcgctattgcacaattttgtttttgtactttctaatatagtgtttaggttctttttcatatgagaatattgatttactaaaatatctatgtttaacttttgttctatgacgtccttatcggcggtatcggtacatatacgtaattcaccttcacaaaatacggagtcttcgataataatagccaatcgattattggatctagctgtctgtatcatattcaacatgtttaatatatcctttcgtttcccctttacaggcatcgatcgtagcatattttccgcgtctgatatggaaatgttaaaactacaaaaatgcgtaatgttagcccgtcctaatattggtacgtgtctataagtttggcatagtagaataatagacgtgtttaaatgccttccaaagtttaagaattctattagagtattgcattttgatagtttatcgcctacatcatcaaaaataagtaaaaagtgtgctgattttttatgattttgtgcgacagcaatacatttttctatgttacttttagttcgtatcagattatattctagagattcctgactactaacgaaattaatatgatttggccaaatgtatccatcataatctgggttataaacgggtgtaaacaagaatatatgtttatattttttaactagtgtagaaaacagagatagtaaatagatagtttttccagatccagatcctcctgttaaaaccattctaaacggcatttttaataaattttctcttgaaaattgtttttcttggaaacaattcataattatatttacagttactaaattaatttgataataaatcaaaatatggaaaactaaggttgttagtagggaggagaacaaagaaggcacatcgtgatataaataacatttattatcatgatgacaccagaaaacgacgaagagcagacatctgtgttctccgctactgtttacggagacaaaattcagggaaagaataaacgcaaacgcgtgattggtctatgtattagaatatctatggttatttcactactatctatgattaccatgtccgcgtttctcatagtgcgcctaaatcaatgcatgtctgctaacgaggctgctattactgacgccgctgttgccgttgctgctgcatcatctactcatagaaaggttgcgtctagcactacacaatatgatcacaaagaaagctgtaatggtttatattaccagggttcttgttatatattacattcagactaccagttattctcggatgctaaagcaaattgcactgcggaatcatcaacactacccaataaatccgatgtcttgactacctggctcattgattatgttgaggatacatggggatctgatggtaatccaattacaaaaactacatccgattatcaagattctgatgtatcacaagaagttagaaagtatttttgtgttaaaacaatgaactaatatttatttttgtacattaataaatgaaatcgcttaatagacaaactgtaagtaggtttaagaagttgtcggtgccggccgctataatgatgatactctcaaccattattagtggcataggaacatttctgcattacaaagaagaactgatgcctagtgcttgcgccaatggatggatacaatacgataaacattgttatttagatactaacattaaaatgtctacagataatgcggtttatcagtgtcgtaaattacgagctagattgcctagacctgatactagacatctgagagtattgtttagtattttttataaagattattgggtaagtttaaaaaagaccaatgataaatggttagatattaataatgataaagatatagatattagtaaattaacaaattttaaacaactaaacagtacgacggatgctgaagcgtgttatatatacaagtctggaaaactggttaaaacagtatgtaaaagtactcaatctgtactatgtgttaaaaaattctacaagtgacaacaaaaaatgaattaataataagtcgttaacgtacgccgccatggacgccgcgtttgttattactccaatgggtgtgttgactataacagatacattgtatgatgatctcgatatctcaatcatggactttataggaccatacattataggtaacataaaaactgtccaaatagatgtacgggatataaaatattccgacatgcaaaaatgctactttagctataagggtaaaatagttcctcaggattctaatgatttggctagattcaacatttatagcatttgtgccgcatacagatcaaaaaataccatcatcatagcatgcgactatgatatcatgttagatatagaagataaacatcagccattttatctattcccatctattgatgtttttaacgctacaatcatagaagcgtataacctgtatacagctggagattatcatctaatcatcaatccttcagataatctgaaaatgaaattgtcgtttaattcttcattctgcatatcagacggcaatggatggatcataattgatgggaaatgcaatagtaattttttatcataaaagttgtaaagtaaataataaaacaataaatattgaactagtagtacgtatattgagcaatcagaaatgatgctggtacctcttatcacggtgaccgtagttgcgggaacaatattagtatgttatatattatatatttgtaggaaaaagatacgtactgtctataatgacaataaaattatcatgacaaaattaaaaaagataaagagttctaattccagcaaatctagtaaatcaactgatagcgaatcagactgggaggatcactgtagtgctatggaacaaaacaatgacgtagataatatttctaggaatgagatattggacgatgatagcttcgctggtagtttaatatgggataacgaatccaatgttatggcgcctagcacagaacacatttacgatagtgttgctggaagcacgctgctaataaataatgatcgtaatgaacagactatttatcagaacactacagtagtaattaatgaaacggagactgttgaagtacttaatgaagataccaaacagaatcctaactattcatccaatcctttcgtaaattataataaaaccagtatttgtagcaagtcaaatccgtttattacagaacttaacaataaatttagtgagaataatccgtttagacgagcacatagcgatgattatcttaataagcaagaacaagatcatgaacacgatgatatagaatcatcggtcgtatcattggtgtgattagtttcctttttataaaattgaagtaatatttagtattattgctgccgtcacgttgtacaaatggagatattccctgtattcggcatttctaaaattagcaattttattgctaataatgactgtagatattatatagatacagaacatcaaaaaattatatctgatgagatcaatagacagatggatgaaacggtacttcttaccaacatcttaagcgtagaagttgtaaatgacaatgagatgtaccatcttattcctcatagattatcgacgattatactctgtattagttctgtcggaggatgtgttatctctatagataatgacatcaatggcaaaaatattctaacctttcccattgatcatgctgtaatcatatccccactgagtaaatgtgtcgtagttagcaagggtcctacaaccatattggttgttaaagcggatatacctagcaaacgattggtaacatcgtttacaaacgacatactatatgtaaacaatctgtcactgattaattatttgccgttgtctgtattcattattagacgagtcaccgactatttggatagacacatatgcgatcagatatttgctaataataagtggtattcccttataaccatcgacgataagcaatatcctattccatcaaactgtataggtatgtcctctgccaagtacataaattctagcatcgagcaagatactttaatccatgtttgtaacctcgagcatccgttcgactcagtatacaaaaaaatgcagtcgtacaattctctacctatcaaggaacaaatattgtacggtagaattgataatataaatatgagcattagtatttctgtggattaatagatttctagtatggggatcattaatcatctctaatctctaaatacctcataaaacgaaaaaaaagctattatcaaatactgtacggaatggattcattctcttctctttttatgaaactctgttgtatatctactgataaaactggaagcaaaaaatctgatagaaagaataagaataagatcaaggattatatggaacacgattattataaaataacaatagttcctggttcctcttccacgtctactagctcgtggtattatacacatgcctagtaatagtctctttgcgttgacggaaagcagactagaaataacaggctaaaatgttcagacaccataatagttcccaacccagataataacagagttccatcaacacattcctttaaactcaatcccaaacccaaaaccgttaaaatgtatccggccaattgatagtagataatgaggtgtacagcgcatgataatttacacagtaaccaaaatgaaaatactttagtaattataagaaatatagacggtaatgtcatcatcaacaatccgataatatgcctgagagtaaacattgacggataaaacaaaaatgctccgcataactctatcatggcaataacacaaccaaatacttgtaagattcctaaattagtagaaaatacaacgaatatcgatgtataagtgatctcgagaaataataagaataaagtaatgcccgtaaagataaacatcaacattgtttggtaatcattaaaccaattagtatgaagttgaactaatttcacagtagattttattccagtgttatcctcgcatgtataagtacctggtaagatatctttatattccataatcaatgagacatcactatctgataacgaatgaagtctagcactagtatgccatttacttaatattgtcgtcttggaagttttattataagttaaaatatcatggttatccaatttccatctaatatactttgtcggattatctatagtacacggaataatgatggtatcattacatgctgtatactctatggtctttgtagttgttataacaaccaacgtatagaggtatatcaacgatattctaactcttgacattttttatttatttaaaatgatacctttgttatttattttattctattttgctaacggtattgaatggcataagtttgaaacgagtgaagaaataatttctacttacttattagacgacgtattatacacgggtgttaatggggcggtatacacattttcaaataataaactaaacaaaactggtttaactaataataattatataacaacatctataaaagtagaggatgcggataaggatacattagtatgcggaaccaataacggaaatcccaaatgttggaaaatagacggttcagacgacccaaaacatagaggtagaggatacgctccttatcaaaatagcaaagtaacgataatcagtcacaacggatgtgtactatctgacataaacatatcaaaagaaggaattaaacgatggagaagatttgacggaccatgtggttatgatttattcacggcggataacgtaattccaaaagatggtttacgaggagcattcgtcgataaagacggtacttatgacaaagtttacattcttttcactgatactatcggctcaaagagaattgtcaaaattccgtatatagcacaaatgtgcctaaacgacgaaggtggtccatcatcattgtctagtcatagatggtcgacgtttctcaaagtcgaattagaatgtgatatcgacggaagaagttatagacaaattattcattctagaactataaaaacagataatgatacgatactatatgtattcttcgatagtccttattccaagtccgcattatgtacctattctatgaataccattaaacaatctttttctacgtcaaaattggaaggatatacaaagcaattgccgtctccagctcctggtatatgtttaccagctggaaaagttgttccacataccacgtttgaagtcatagaacaatataatgtactagatgatattataaagcctttatctaaccaacctatcttcgaaggaccgtctggtgttaaatggttcgatataaaggagaaggaaaatgaacatcgggaatatagaatatacttcataaaagaaaattctatatattcgttcgatacaaaatctaaacaaactcgtagctcgcaagtcgatgcgcgactattttcagtaatggtaactgcgaaaccgttatttatagcagatatagggataggagtaggaatgccacaaatgaaaaaaatacttaaaatgtaatcttaatcgagtacaccacacgacaatgaacaaacataagacagattatgctggttatgcttgctgcgtaatatgcggtctaattgtcggaattatttttacagcgacactattaaaagttgtagaacgtaaattagttcatacaccattaatagataaaacgataaaagatgcatatattagagaagattgtcctactgactggataagctataataataaatgtatccatttatctactgatcgaaaaacctgggaggaaggacgtaatgcatgcaaagctctaaattcaaattcggatctaattaagatagagactccaaacgagttaagttttttaagaagccttagacgaggctattgggtaggagaatccgaaatattaaaccagacaaccccatataattttatagctaagaatgccacgaagaatggaactaaaaaacggaaatatatttgtagcacaacgaatactcccaaactgcattcgtgttacactatataacaattacactacatttttatcataccactacttcggttagatgttttagaaaaaaataaatatcgccgtaccgttcttgtttttataaaaataacaattaacaattatcaaattttttctttaatattttacgtggttgaccattcttggtggtaaaataatctcttagtgttggaatggaatgctgtttaatgtttccacactcatcgtatattttgacgtatgtagtcacatcgtttacgcaatagtcagactgtagttctatcatgcttcctacatcagaaggaggaacagttttaaagtctcttggttttaatctattaccgttagttttcatgaaatcctttgttttatccacttcacattttaaataaatgtccactatacattcttttgttaattttactagatcgtcatgggtcatagaatttataggttccgtagtccatggatccaaactagcaaacttcgcgtatacggtatcgcgattagtgtatacaccaactgtatgaaaattaagaaaacagtttaataaatcaacagaaatatttaatcctccgtttgatacagatgcgccatatttatggatttcggattcacacgttgtttgtctgaggtgttcgtctagtgttgcttctacgtaaacttcgattcccatatattctttattgtcagaatcgcataccgatttatcatcatacactgtttgaaaactaaatggtatacacatcaaaataataaataataacgagtacattctgcaatattgttatcgtaattggaaaaatagtgttcgagtgagttggattatgtgagtattggattgtatattttattttatattttgtaataagaataaaatgctaatgtcaagtttattccaatagatgtcttattaaaaacatatataataaataacaatggctgaatggcataaaattatcgaggatatctcaaaaaataataagttcgaggatgccgccatcgttgattacaagactacaaagaatgttctagctgctattcctaacagaacatttgccaagattaatccgggtgaaattattcctctcatcactaatcgtaatattctaaaacctcttattggtcagaaatattgtattgtatatactaactctctaatggatgagaacacgtatgctatggagttgcttactgggtacgcccctgtatctccgatcgttatagcgagaactcataccgcacttatatttttgatgggtaagccaacaacatccagacgtgacgtgtatagaacgtgtagagatcacgctacccgtgtacgtgcaactggtaattaaaataaaaagtaatattcatatgtagtgtcaattttaaatgatgatgatgaaatggataatatccatattgacgatgtcaataatgccggtattggcatacagttcatcgatttttagatttcattcagaggatgtggaattatgttatgggcatttgtattttgataggatctataatgtagtaaatataaaatataatccgcatattccatatagatataattttattaatcgcacgttaaccgtagatgaactagacgataatgtcttttttacacatggttattttttaaaacacaaatatggttcacttaatcctagtttgattgtctcattatcaggaaacttaaaatataatgatatacaatgctcagtaaatgtatcgtgtctcattaaaaatttggcaacgagtacatctactatattaacatctaaacataagacttattctctacatcggtccacgtgtattactataataggatacgattctattatatggtataaagatataaatgacaagtataatgacatctatgattttactgcaatatgtatgctaatagcgtctacattgatagtgaccatatacgtgtttaaaaaaataaaaatgaactcttaattatgctatgctattagaaatggataaaatcaaaattacggttgattcaaaaattggtaatgttgttaccatatcgtataacttggaaaagataactattgatgtcacacctaaaaagaaaaaagaaaaggatgtattattagcgcaatcagttgctgtcgaagaggcaaaagatgtcaaggtagaagaaaaaaatattatcgatattgaagatgacgatgatatggatgtagaaagcgcgtaatacgatctataaaaataagtatataaatactttttatttactgtactcttactgtgtagtggtgataccctactcgattatttttttaaaaaaaaaatacttattctgattcttctagccatttccgtgttcgtttgaatgccacatcgacgtcaaagataggggagtagttgaaatctagttctgcattgttggtacgcacctcaaatgtagtgttggatatcttcaacgtatagttgttgagtagtgatggttttctaaatagaattctcttcatatcattcttgcacgcgtacatttttagcatccatcttggaatcctagatccttgttctattcccaatggtttcatcaatagaagattaaacatatcgtacgaacacgatggagagtaatcgtagcaaaagtaagcatttcctttaatcttagatcccggatactggatatattttgcagccaacacgtgcatccatgcagcatttcctacatatacccggctatgcaccgcgtcatcatcgactgtacgatacataatgttaccgtgttgcttacattgctcgtaaaagactttcatcaatttgtctccttctccgtaaattccagtgggtcttaggcaacaagtatacaattttgctccattcatgattacggaattattggctttcataaccagttgctcggccatacgtttactttttgcgtatacatgtcctggtgatatatcataaagggtatgctcatggccgatgaatggatcaccgtgtttattgggtcctattgcttccatgctactagtatagatcaaatacttgattcctaggtccacacaagctgccaaaatagtctgtgttccataatagtttactttcatgatttcattatcggtgtattttccaaatacatccactagagcagccgtatgaataatcagatttaccccatctagcgcttctctcaccttatcaaagtcgtttatatcacattgtatatagtttataaccttaactttcgaggttattggttgtggatcttctacaatatctatgactctgatttcttgaacatcatctgcactaattaacagttttactatatacctgcctagaaatccggcaccaccagtaaccgcgtacacggccattgctgccactcataatatcagactacttattctattttactaaataatggctgtttgtataatagaccacgataatatcagaggagttatttactttgaaccagtccatggaaaagataaagttttaggatcagttattggattaaaatccggaacgtatagtttgataattcatcgttacggagatattagtcaaggatgtgattccataggcagtccagaaatatttatcggtaacatctttgtaaacagatatggtgtagcatatgtttatttagatacagatgtaaatatatttacaattattggaaaggcgttatctatttcaaaaaatgatcagagattagcgtgtggagttattggtatttcttacataaatgaaaagataatacattttcttacaattaacgagaatggcgtttgatatatcagttaatgcgtctaaaacaataaatgcattagtttacttttctactcagcaaaataaattagtcatacgtaatgaagttaatgatacacactacactgtcgaatttgatagggacaaagtagttgacacgtttatttcatataatagacataatgacaccatagagataagaggggtgcttccagaggaaactaatattggttgcgcggttagtatgacttacttgtataataagtatagttttaaactgattttagcagaatatataagacacagaaatactatatccggcaatatttattcggcattgatgacactagatgatttggctattaaacagtatggagacattgatctattatttaatgagaaacttaaagtagactccgattcgggactatttgactttgtcaactttgtaaaggatatgatatgttgtgattctagaatagtagtagctctatctagtctagtatctaaacattgggaattgacaaataaaaaatataggtgtatggcattagccgaacatatatctgatagtattccaatatctgagctatctagactacgatacaatctatgtaagtatctacgcggacacactgagagcatagaggataaatttgattattttgaagacgatgattcgtctacatgttctgccgtaaccgacagggaaacggatgtataattttttttatagcgtgaaggatatgataaaaaatataattgttgtatttatcccattccaatcaccttatatgattctgtaacacaataaaggagtcttatagatgtatagaggtcagatactggtttgataaactgtttattccacataagtatgtttgactttatggttagacccgcatactttaacaaatcactgaaaattggagttaggtattgacctctcagaatcagttgccgttctggaacattaaatgtattttttatgatatactccaacgcatttatgtgggcatacaacaagtcattactaatggaatattccaagagttttagttgtctagtatttaacaagagaagagatttcaacagactgtttatgaactcgaatgccgcctcattgtcgcttatattgatgatgtcgaattctcccaatatcatcaccgatgagtagctcatcttgttatcgggatccaagttttctaaagatgtcattaaaccctcgatcatgaatggatttatcatcatcgtttttatgttggacatgagcttagtccgtttgtccacatctatagaagatgatttctgaattatttcatatatctctctctttaactccaggaacttgtcaggatggtctactttaatatgttctcgtctaagagatgaaaatctttggatggttgcacgcgacttttctctaaaggatgacgttgcccaagatcctctcttaaatgaatccatcttatccttggacaagatggacagtctattttccttagatggtttaatatttttgttacccatgatctataaaggtagacctaatcgtctcggatgaccatatatttattttcagttttattatacgcataaattgtaaaaaatatgttaggtttacgaaaatgtctcgtggggcattaatcgtttttgaaggattggacaaatctggaaaaacaacacaatgtatgaacatcatggaatcaataccttcaaacacaataaaataccttaactttcctcagagatccactgtcactggaaagatgatagatgactatctaactcgtaaaaaaacctataatgatcatatagttaatctattattttgtgcaaatagatgggagtttgcatcttttatacaagaacaactagaacagggaattactttaatagttgatagatacgcattttctggagtagcgtatgccgccgctaaaggcgcgtcaatgactctcagtaagagttatgaatctggattgcctaaacccgacttagttatattcttggaatctggtagcaaagaaattaatagaaacgtcggtgaggaaatttatgaagatgttacattccaacaaaaggtattacaagaatataaaaaaatgattgaagaaggagatattcattggcaaattatttcttctgaattcgaggaagatgtaaagaaggagttgattaagaatatagttatagaggctatacacacggttactggaccagtggggcaactgtggatgtaatagtgaaattacattttttataaatagatgttagtacagtgttataaatggatgaagcatattactctggcaacttggaatcagtactcggatacgtgtccgatatgcataccgaactcgcatcaatatctcaattagttattgccaagatagaaactatagataatgatatattaaacaaggacattgtaaattttatcatgtgtagatcaaacttggataatccatttatctctttcctagatactgtatatactattatagatcaagagaactatcagactgagttgattaattcattagacgacaatgaaattatcgattgtatagttaataagtttatgagcttttataaggataacctagaaaatatagtagatgctatcattactctaaaatatataatgaataatccagattttaaaactacgtatgccgaagtactcggttccagaatagccgatatagatattaaacaagtgatacgtaagaatatactacaattgtctaataatatccgcgaacgatatttgtgaaaatattaaaaaaaaatactttttttattaaatgacgtcttttcgtgaatttagaaaattatgctgtgctatatatcacgcatcaggatataaagaaaaatctaaattaattagagactttataacagatagggatgataaatatttgatcattaagctattgcttcccggattagacgatagaatttataacatgaacgataaacaaattataaaattatatagtataatatttaaacaatctcaggaagatatgctacaagatttaggatacggatatataggagacactattaggactttcttcaaagagaacacagaaatccgtccacgagataaaagcattttaactttagaagaagtggatagttttttaactacgttatcatccgtaactaaagaatcgcatcaaataaaattattgactgatgtagcatctgtttgtacatgtaatgatttaaaatgtgtagtcatgcttattgataaagatctaaaaattaaagcgggtcctcggtacgtacttaacgctattagtcctaatgcctatgatgtgtttagaaaatctaataacttgaaagagataatagaaaattcatctaaacaaaatctagactctatatctatttctgttatgactccaattaatcccatgttagcggaatcgtgtgattctgtcaataaggcgtttaaaaaatttccatcaggaatgtttgcggaagtcaaatacgatggtgaaagagtacaagttcataaaaataataacgagtttgccttctttagtagaaacatgaaaccagtactctctcataaagtggattatctcaaagaatacataccgaaagcatttaaaaaagctacgtctatcgtattggattctgaaattgttcttgtagacgaacataatgtaccgctcccgtttggaagtttaggtatacacaaaaagaaagaatataaaaactctaacatgtgtttgttcgtgtttgactgtttgtactttgatggattcgatatgacggacattccattgtacgaacgaagatcttttctcaaagatgttatggttgaaatacccaatagaatagtattctcagagttgacgaatattagtaacgagtctcagttaactgacgtattggatgatgcactaacgagaaaattagaaggattggtcttaaaagatattaatggagtatacgaaccgggaaagagaagatggttaaaaataaagcgagactatttgaacgagggttccatggcagattctgccgatttagtagtactaggtgcctactatggtaaaggagcaaagggtggtatcatggcagtctttctaatgggttgttacgacgatgaatccggtaaatggaagacggttaccaagtgttcaggacacgatgataatacgttaagggagttgcaagaccaattaaagatgattaaaattaacaaggatcccaaaaaaattccagagtggttagtagttaataaaatctatattcccgattttgtagtagaggatccgaaacaatctcagatatgggaaatttcaggagcagagtttacatcttccaagtcccataccgcaaatggaatatccattagatttcctagatttactaggataagagaggataaaacgtggaaagaatctactcatctaaacgatttagtaaacttgactaaatcttaatagttacatacaaactgaaaattaaaataacactatttagttggtggtcgccatggatggtgttattgtatactgtctaaacgcgctagtaaaacatggcgaggaaataaatcatataaaaaatgatttcatgattaaaccatgttgtgaaagagtttgtgaaaaagtcaagaacgttcacattggcggacaatctaaaaacaatacagtgattgcagatttgccatatatggataatgcggtatccgatgtatgcaattcactgtataaaaagaatgtatcaagaatatccagatttgctaatttgataaagatagatgacgatgacaagactcctactggtgtatataattattttaaacctaaagatgccattcctgttatcatatctataggaaaggataaagatgtctgtgaactattaatctcatcagacatatcgtgtgcatgcgtggagttaaattcatatcacgtagccattcttcccatggatgtttccttttttaccaaaggaaatgcatcattgattattctcctgtttgatttctctatcgatgcggcacctctcttaagaagtgtaaccgataataatgttattatatctagacaccagcgtctacatgacgagcttccgagttccaattggttcaagttttacataagtataaagtccgactattgttctatattatatatggttgttgatggatctgtgatgcatgcgatagctgataatagaactcacgcaattattagcaaaaatatattagacaatactacgattaacgatgagtgtagatgctgttattttgaaccacagattaggattcttgatagagatgagatgctcaatggatcatcgtgtgatatgaacagacattgtattatgatgaatttacctgatgtaggcgaatttggatctagtatgttggggaaatatgaacctgacatgattaagattgctctttcggtggctggtaatttaataagaaatcgagactacattcccgggagacgaggatatagctactacgtttacggtatagcctctagataatttttttaagcacgaaataaaaaacataattttaaaccaatctatttcatactattttgtgtgatcaccatggacataaagatagatattagtatttctggtgataaatttacggtgactactaggagggaaaatgaagaaagaaaaaaatatctacctctccaaaaagaaaaaactactgatgttatcaaacctgattatcttgagtacgatgacttgttagatagagatgagatgtttactattctagaggaatattttatgtacagaggtctattaggcctcagaataaaatatggacgactctttaacgaaattaaaaaattcgacaatgatgcggaagaacaattcggtactatagaagaactcaagcagaaacttagattaaattctgaagagggagcagataactttatagattatataaaggtacaaaaacaggatatcgtcaaacttactgtatacgattgcatatctatgataggattgtgtgcatgcgtggtagatgtttggagaaatgagaaactgttttctagatggaaatattgtttacgagcgattaaactgtttattgatgatcacatgcttgataagataaaatctatactgcagaatagactagtatatgtggaaatgtcatagaaagttaaaagttaatgagagcaaaaatatataaggttgtattccatatttgttatttttttctgtaatagttagaaaaatacattcgatggtctatctatcagattattatgtgttataaggtactttttctcataataaactagagtatgagtaagatagtgtttttcaaaacatataaatctaaaattgatggatgagatatacagctattaatttcgaaaatatattttaatctgataactttaaacatggatttttaatggtggtttaacgttttaaaaaaagattttgttattgtagtatatgataatattaaaagatggatataaagaatttgctgactgcatgtactattttttacattactacattggctacggcagatatacctacttcgtcactgccacacgctccggtaaacggggcatgtgacgagggagaatatcttgataagaggcataatcaatgttgtaatcagtgtccacctggagaatttgccaaggttagatgtaatggtaacgataacacaaaatgtgaacgctgcccacctcatacatataccgcaatccccaattactctaatggatgtcatcaatgtagaaaatgcccaacaggatcatttgataaggtaaagtgtaccggaacacagaacagtaaatgttcgtgtcttcctggttggtattgcgctactgattcttcacagactgaagattgtcgagattgtataccaaaaaggagatgtccatgcggatactttggtggaatagatgaacaaggaaatcctatttgtaaatcgtgttgtgttggtgaatattgcgactacctacgtaattatagacttgatccatttcctccatgcaaactatctaaatgtaattaattatgattttgatgataatgttaccatacattatatcgctacttggttagtgtattattcagtatgaagacctattaataattacttatcttttgacgatcttgttataattataatataaaaatacttatggcatagtaactcataattgctgacgcgataaattcgtaataatctgttttgttcaaatttttataaggaatctacaggcataaaaataaaaatataatttataatatactcttacagcgcgccatcatgaataacagcagtgaattgattgctgttattaatggatttagaaatagtggacgattttgtgatattaatatagttattaatgatgaaaggataaacgctcacagactcatcctatctggagcctccgaatatttttccattctgttttccaataattttatcgattctaatgaatacgaagttaatctaagtcatttagattatcaaagtgttaacgatttgatcgattacatttatgggatacctttgagcctaactaacgataacgtgaaatatattctttcaaccgctgattttttacaaattggatctgctattacggagtgtgaaaattacatacttaaaaatctttgttctagaaactgtatcgatttctacatatacgctgataaatataataacaagaaaatagaatcagcgtcgtttaacacaatattacaaaatattttgagactcatcaacgatgaaaactttaaatacttaacagaggaatcaatgataaaaattttaagcgatgatatgttaaatataaaaaatgaggatttcgccccactaattctcattaaatggttagagagtactcaacaaccatgcaccgtcgagttacttaaatgcctcagaatatcattgctttccccacaagttataaaatcactttatagtcatcgactggttagttcaatctacgaatgtataacattcttaaacaatatagcattcttggatgaatcatttcctagataccatagcatcgagttgatatctatcggtataagtaattcgcatgataagatttccataaactgctacaatcataaaaaaaatacatgggaaatgatatcttcacgtagatataggtgtagtttcgcagtggccgtcctggataatattatctatatgatgggtggatatgatcagtccccgtatagaagttcaaaggttatagcgtacaatacatgtacaaattcttggatatatgatataccagagctaaaatatcctcgttctaattgtgggggactggctgatgacgaatacatttattgtataggcggcatacgcgatcaggattcatcgttgacatctagtattgatagatggaagccatcaaaaccatattggcagaagtatgctaaaatgcgcgaaccaaaatgtgatatgggggttgcgatgttaaacggattaatatatgttataggtggaatcgttaaaggtgacacgtgtaccgacgcactagagagtttatcagaagatggatggatgaagcatcaacgtcttccaataaaaatgtccaatatgtcgacgattgttcatgatggcaagatttatatatctggaggttacaacaatagtagtgtagttaatgtaatatcgaatctagtccttagctataattcgatatatgatgaatggaccaaattatcatcattaaacattcctagaattaatcccgctctatggtcagcgcataataaattatatgtaggaggaggaatatctgatgatgttcgaactaatacatctgagacatacgacaaagaaaaagattgttggacattggataatggtcacgtgttaccacgcaattatataatgtataaatgcgaaccgattaaacataaatatccattggaaaaaacacagtacacgaatgattttctaaagtatttggaaagttttataggtagttgatagaacaaaatacataattttgtaaaaataaatcactttttatactaatatgacacgattaccaatacttttgttactaatatcattagtatacgctacaccttttcctcagacatctaaaaaaataggtgatgatgcaactctatcatgtaatcgaaataatacaaatgactacgttgttatgagtgcttggtataaggagcccaattccattattcttttagctgctaaaagcgacgtcttgtattttgataattataccaaggataaaatatcttacgactctccatacgatgatctagttacaactatcacaattaaatcattgactgctagagatgccggtacttatgtatgtgcattctttatgacatcaactacaaatgacactgataaagtagattatgaagaatactccacagagttgattgtaaatacagatagtgaatcgactatagacataatactatctggatctacacattcaccggaaactagttctgagaaacctgattatatagataattctaattgctcgtcggtattcgaaatctaagctcaaaaattgaaaaactagcgtctttttttgctcgaagtcgaccaccatggtgggtgaggatagcgtgctgatcaccgagaacatgcacatgaaactgtacatggagggcaccgtgaacgaccaccacttcaagtgcacatccgagggcgaaggcaagccctacgagggcacccagaccatgaagatcaaggtggtcgagggcggccctctccccttcgccttcgacatcctggctaccagcttcatgtacggcagcaaaacctttatcaaccacacccagggcatccccgacttctttaagcagtccttccctgagggcttcacatgggagaggatcaccacatacgaagacgggggcgtgctgaccgctacccaggacaccagcctccagaacggctgcctcatctacaacgtcaagatcaacggggtgaacttcccatccaacggccctgtgatgcagaagaaaacactcggctgggaggccagcaccgagatgctgtaccccgctgacagcggcctgagaggccatagccagatggccctgaagctcgtgggcgggggctacctgcactgctccctcaagaccacatacagatccaagaaacccgctaagaacctcaagatgcccggcttctacttcgtggacaggagactggaaagaatcaaggaggccgacaaagagacctacgtcgagcagcacgagatggctgtggccaggtactgcgacctgcctagcaaactggggcacagctgattaattaatttttatcgatctaattcaacaatgtctggagagcttcgcaggatcccgactccggaaccaattactgataaagaagatcatacagttacagacactgtctcatacactacagtaagtacatcatctggaattgtcactactaaatcaaccaccgatgatgcggatctttatgatacgtacaatgataatgatacagtaccaccaactactgtaggcggtagtacaacctctattagcaattataaaaccaaggactttgtagaaatatttggtattaccgcattaattatattgtcggccgtggcaattttctgtattacatattatatatataataaacgttcacgtaaatacaaaacagagaacaaagtctagatttttgacttacataaatgtctgggatagtaaaatctatcatattgagcggaccatctggtttaggaaagacagccatagccaaaagactatgggaatatatttggatttgtggtgtcccataccactagatttcctcgtcctatggaacgagaaggtgttgattaccattacgttaacagagaggccatctggaagggaatagccgccggaaactttctagaacatactgagtttttaggaaatatttacggaacttctaaaacagctgtgaatacagcggctattaataatcgtatttgtgtgatggatctaaacatcgacggtgttagaagtcttaaaaatacgtacctaatgccttactcggtgtatataagacctacctctcttaaaatggttgagaccaagcttcgtcgtagaaacactgaagctaacgatgagattcatcgtcgtgtgatgttggcaaaaactgacatggatgaggcaggtgaagccggtctattcgacactattatcattgaagatgatgtgaatttagcatatagtaagttaattcagatactacaggaccgtattagaatgtattttaacactaattagagacttaagacttaaaacttgataattaataatataactcgtttttatatgtgtctatttcaacgtctaatgtattagttaaatattaaaacttaccacgtaaaacttaaaatttaaaatgatatttcattgacagatagatcacacattatgaactttcaaggacttgtgttaactgacaattgcaaaaatcaatgggtcgttggaccattaataggaaaaggtggattcggtagtatttatactactaatgacaataattatgtagtaaaaatagagcccaaagctaacggatcattatttaccgaacaggcattttatactagagtacttaaaccatccgttatcgaagaatggaaaaaatctcacaatataaagcacgtaggtcttatcacgtgcaaggcatttggtctatacaaatccattaatgtggaatatcgattcttggtaattaatagattaggtgcagatctagatgcggtgatcagagccaataataatagactaccaaaaaggtcggtgatgttgatcggaatcgaaatcttaaataccatacaatttatgcacgagcaaggatattctcacggagatattaaagcgagtaatatagtcttagatcaaatagataagaataaattatatctagtggattacggattggtttctaaattcatgtctaatggcgaacatgttccatttataagaaatccaaataaaatggataacggtactctagaatttacacctatagattcgcataaaggatacgttgtatctagacgtggagatctagaaacacttggatattgtatgattagatggttgggaggtatcttaccatggactaagatatctgaaacaaagaattgtgcattagtaagtgccacaaaacagaaatatgttaacaatactgcgactttgttaatgaccagtttgcaatatgcacctagagaattgctgcaatatattaccatggtaaactctttgacatattttgaggaacccaattacgacaagtttcggcacatattaatgcagggtgtatattattaagtgtggtgtttggtcgataaaaattaaaaaataacttaatttattattgatctcgtgtgtacaaccgaaatcatggcgatgttttacgcacacgctctcggtgggtacgacgagaatcttcatgcctttcctggaatatcatcgactgttgccaatgatgtcaggaaatattctgttgtgtcagtttataataacaagtatgacattgtaaaagacaaatatatgtggtgttacagtcaggtgaacaagagatatattggagcactgctgcctatgtttgagtgcaatgaatatctacaaattggaaatccgatccatgatcaagaaggaaatcaaatctctatcatcacatatcgccacaaaaactactatgctctaagcggaatcgggtacgagagtctagacttgtgtttggaaggagtagggattcatcatcacgtacttgaaacaggaaacgctgtatatggaaaagttcaacatgattattctactatcaaagagaaggccaaagaaatgagtgcacttagtccaggacctatcatcgattaccacgtctggataggagattgtatctgtcaagttactgctgtggacgtacatggaaaggaaattatgaaaatgagattcaaaaagggtgcggtgcttccgatcccaaatctggtaaaagttaaacttggggagaatgatacagaaaatctttcttctactatatcggcggcaccatcgaggtaaccacctctctggaagacagcgtgaatcatgtactcatgaaacgtttggaaactatacgccatatgtggtctgttgtatatgatcattttgatattgtgaatggtaaagaatgctgttatgtgcatacgcattcatctaatcaaaatcctataccgagtactgtaaaaacaaatttgtacatgaagactatgggatcatgcattcaaatggattccatggaagctctagagtatcttagcgaactgaaggaatcaggtggatggagtcccagaccagaaatgcaggaatttgaatatccagatggagtggaagacactgaatcaattgagagattggcagaggagttcttcaatagatcagaacttcaggctggtgaatcagtcaaatttggtaattctattaattgttaaacatacatctgtttcagctaagcaactaagaacacgtatacggcagcagcttccttctatactctcatcttttaccaacacaaagggtggatatttgttcattggagttgataataatacacacaaagtatttggattcacggtgggttacgactacctcagactgatagagaatgatatagaaaagcatatcaaaagacttcgtgttgtgcatttctgtgagaagaaagaggacatcaagtacgcgtgtcgattcatcaaggtatataaacctggggatgagactacctcgacatacgtgtgcgctatcaaagtggaaagatgctgttgtgctgtgtttgcagattggccagaatcatggtatatggatactaatggtatcaagaagtattctccagatgaatgggtgtcacatataaaattttaattaatgtaactatagagaacaaataataaggttgtaatatcatatagacaataactaacaattaattagtaactgttatctcttttttaactaaccaactaactatatacctattaatacatcgtaattatagttcttaacatctattaatcattaattcgcttctttaattttttataaactaacattgttaattgaaaagggataacatgttacagaatataaattatatatggatttttttaaaaaggaaatacttgactggagtatatatttatctcttcattatatagcacgcgtgttttccaatttttccacatcccatataatacaggattataatctcgttcgaacatacgagaaagtggataaaacaatagttgattttttatctaggttgccaaatttattccatattttagaatatggggaaaatattctacatatttattctatggatgatgctaatacgaatattataattttttttctagatagagtattaaatattaataagaacgggtcatttatacacaatctcgggttatcatcatccattaatataaaagaatatgtatatcaattagttaataatgatcatccagataataggataagactaatgcttgaaaatggacgtagaacaagacattttttgtcctatatatcagatacagttaatatctatatatgtattttaataaatcatggattttatatagatgccgaagacagttacggttgtacattattacatagatgtatatatcactataagaaatcagaatcagaatcatacaatgaattaattaagatattgttaaataatggatcagatgtagataaaaaagatacgtacggaaacacaccttttatcctattatgtaaacacgatatcaacaacgtggaattgtttgagatatgtttagagaatgctaatatagactctgtagactttaatagatatacacctcttcattatgtctcatgtcgtaataaatatgattttgtaaagttattaatttctaaaggagcaaatgttaatgcgcgtaataaattcggaactactccattttattgtggaattatacacggtatctcgcttataaaactatatttggaatcagacacagagttagaaatagataatgaacatatagttcgtcatttaataatttttgatgctgttgaatctttagattatctattatccagaggagttattgatattaactatcgtactatatacaacgaaacatctatttacgacgctgtcagttataatgcgtataatacgttggtctatctattaaacaaaaatggtgattttgagacgattactactagtggatgtacatgtatttcggaagcagtcgcaaacaacaacaaaataataatggaagtactattgtctaaacgaccatctttgaaaattatgatacagtctatgatagcaattactaaacataaacagcataatgcagatttattgaaaatgtgtataaaatatactgcgtgtatgaccgattatgatactcttatagatgtacagtcgctacagcaatataaatggtatattttaagatgtttcgatgaaatagatatcatgaagagatgttatataaaaaataaaactgtattccaattagttttttgtatcaaagacattaatactttaatgagatacggtaaacatccttctttcgtgaaatgcactagtctcgacgtatacggaagtcgtgtacgtaatatcatagcatctattagatatcgtcagagattaattagtctattatccaagaagctggatcctggagataaatggtcgtgttttcctaacgaaataaaatataaaatattggaaaactttaacgataacgaactatccacatatctaaaaatcttataaacattattaaaatataaaatctaagtaggataaaatcacactacatcattgtttccttttagtgctcgacagtgtatactatttttaacgctcataaataaaaatgaaaacgatttccgttgttacgttgttatgcgtactacctgctgttgtttattcaacatgtactgtacccactatgaataacgctaaattaacgtctaccgaaacatcgtttaatgataaccagaaagttacgtttacatgtgatcagggatatcattctttggatccaaatgctgtctgtgaaacagataaatggaaatacgaaaatccatgcaaaaaaatgtgcacagtttctgattatgtctctgaactatataataaaccgctatacgaagtgaattccaccatgacactaagttgcaacggcgaaacaaaatattttcgttgcgaagaaaaaaatggaaatacttcttggaatgatactgttacgtgtcctaatgcggaatgtcaacctcttcaattagaacacggatcgtgtcaaccagttaaagaaaaatactcatttggggaatatatgactatcaactgtgatgttggatatgaggttattggtgcttcgtacataagttgtacagctaattcttggaatgttattccatcatgtcaacaaaaatgtgatatgccgtctctatctaacggattaatttccggatctacattttctatcggtggcgttatacatcttagttgtaaaagtggttttacactaacggggtctccatcatccacatgtatcgacggtaaatggaatcccatactcccaatatgtgtacgaactaacgaaaaatttgatccagtggatgatggtcccgacgatgagacagatttgagcaaactctcgaaagacgttgtacaatatgaacaagaaatagaatcgttagaagcaacttatcatataatcatagtggcgttgacaattatgggcgtcatatttttaatctccgttatagtattagtttgttcctgtgacaaaaataatgaccaatataagttccataaattgctaccgtaaatataaatccgttaaaataattaataatttaataacaaacaagtatcaaaagattaaagacttatagctagaatcaattgagatgtcttcttcagtggatgttgatatctacgatgccgttagagcatttttactcaggcactattataacaagagatttattgtgtatggaagaagtaacgccatattacataatatatacaggctatttacaagatgcgccgttataccgttcgatgatatagtacgtactatgccaaatgaatcacgtgttaaacaatgggtgatggatacacttaatggtataatgatgaatgaacgcgatgtttctgtaagcgttggcaccggaatactattcatggaaatgtttttcgattacaataaaaatagtatcaacaatcaactaatgtatgatataattaatagcgtatctataattctagctaatgagagatatagaagcgcttttaacgacgatggtatatacatccgtagaaatatgattaacaagttgtacggatacgcatctctaactactattggcacgatcgctggaggtgtttgttattatctgttgatgcatctagttagtttgtataaataattatttcaatatactagttaaaattttaagattttaaatgtataaaaaactaataacgtttttatttgtaataggtgcattagcatcctattcgaataatgagtacactccgtttaataaactgagtgtaaaactctatatagatggagtagataatatagaaaattcatatactgatgataataatgaattggtgttaaattttaaagagtacacaatttctattattacagagtcatgcgacgtcggatttgattccatagatatagatgttataaacgactataaaattattgatatgtataccattgactcgtctactattcaacgcagaggtcacacgtgtagaatatctaccaaattatcatgccattatgataagtacccttatattcacaaatatgatggtgatgagcgacaatattctattactgcagagggaaaatgctataaaggaataaaatatgaaataagtatgatcaacgatgatactctattgagaaaacatactcttaaaattggatctacttatatatttgatcgtcatggacatagtaatacatattattcaaaatatgatttttaaaaatttaaaatatattatcacttcagtgacagtagtcaaataacaaacaacaccatgagatatattataattctcgcagttttgttcattaatagtatacatgctaaaataactagttataagtttgaatccgtcaattttgattccaaaattgaatggactggggatggtctatacaatatatcccttaaaaattatggcatcaagacgtggcaaacaatgtatacaaatgtaccagaaggaacatacgacatatccgcatttccaaagaatgatttcgtatctttctgggttaaatttgaacaaggcgattataaagtggaagagtattgtacgggactatgcgtcgaagtaaaaattggaccaccgactgtaacattgactgaatacgacgaccatatcaatttgtacatcgagcatccgtatgctactagaggtagcaaaaagattcctatttacaaacgcggtgacatgtgtgatatctacttgttgtatacggctaacttcacattcggagattctaaagaaccagtaccatatgatatcgatgactacgattgcacgtctacaggttgcagcatagactttgtcacaacagaaaaagtgtgcgtgacagcacagggagccacagaagggtttctcgaaaaaattactccatggagttcgaaagtatgtctgacacctaaaaagagtgtatatacatgcgcaattagatccaaagaagatgttcccaatttcaaggacaaaatggccagagttatcaagagaaaatttaatacacagtctcaatcttatttaactaaatttctcggtagcacatcaaatgatgttaccacttttcttagcatgcttaacttgactaaatattcataactaatttttattaatgatacaaaaacgaaataaaactgcatattatacactggttaacgcccttataggctctaaccattttcaagatgaggtccctgattatagtccttctgttcccctctatcatctactccatgtctattagacgatgtgagaagactgaagaggaaacatggggattgaaaatagggttgtgtataattgccaaagatttctatcccgaaagaactgattgcagtgttcatctcccaactgcaagtgaaggattgataactgaaggcaatggattcagggatatacgaaacaccgataaattataaaaaaagcaatgtgtccgctgtttccgttaataatactattttcgtaactggcggattattcataaataactctaatagcacgatcgtggttaacaatatggaaaaacttgacatttataaagacaaacaatggtcgattatagaaatgcctatggctagggtatatcacggcattgactcgacatttggaatgttatattttgccggaggtctatccgttaccgaacaatatggtaatttagagaaaaacaacgagatatcttgttacaatcctagaacgaataagtggtttgatatttcatatactatttataagatatccatatcatcattgtgtaaactaaataacgtcttctatgtatttagtaaggacattggatatgtggaaaagtatgatggtgcatggaagttagtacatgatcgtctccccgctataaaggcattatcaacttctccttattgattgaaaatgaaaatataaatagtttttatgtatagcagtattaccctatagttttattgcttactactaacatggatacagatgttacaaatgtagaagatatcataaatgaaatagatagagagaaagaagaaatactaaaaaatgtagaaattgaaaataataaaaacattaacaagaatcatcccaatgaatatattagagaagcactcgttattaataccagtagtaatagtgattccattgataaagaagttatagaatgtatcagtcacgatgtaggaatatagatcatatctactaatttttataatcgatacaaaacataaaaaacaactcgttattacatagcaggcatggaatccttcaagtattgttttgataacgatggcaagaaatggattatcggaaatactttatattctggtaattcaatactctataaggtcagaaaaaatttcactagttcgttctacaattacgtaatgaagatagatcacaaatcacacaagccattgttgtctgaaatacgattctatatatctgtattggatcctttgactatcgacaactggacacgggaacgtggtataaagtatttggctattccagatctgtatggaattggagaaaccgatgattatatgttcttcgttataaagaattcgggaagagtattcgccccaaaggatactgaatcagtcttcgaagcatgcgtcactatgataaacacgttagagtttatacactctcgaggatttacccatggaaaaatagaaccgaggaatatactgattagaaataaacgtctttcactaattgactattctagaactaacaaactatacaagagtggaaactcacatatagattacaacgaggacatgataacttcaggaaatatcaattatatgtgtgtagacaatcatcttggagcaacagtttcaagacgaggagatttagaaatgttgggatattgcatgatagaatggttcggtggcaaacttccatggaaaaacgaaagtagtataaaagtaataaaacaaaaaaaagaatataaaaaatttatagctactttctttgaggactgttttcctgaaggaaatgaacctctggaattagttagatatatagaattagtatacacgttagattattctcaaactcctaattatgacagactacgtaaactgtttatacaagattgaaattatattcttttttttatagagtgtggtagtgttacggatatctaatattaatattagactatctctatcgcgctacacgaccaatatcgattactatggatatcttctatgaaaggagagaatgtatttatttctccagcgtcaatctcgtcagtattgacaatactgtattatggagctaatggatccactgctgaacagctatcaaaatatgtagaaacggaggagaacacggataaggttagcgctcagaatatctcattcaaatccatgaataaagtatatgggcgatattctgccgtgtttaaagattcctttttgagaaaaattggcgataagtttcaaactgttgacttcactgattgtcgcactatagatgcaatcaacaagtgtgtagatatctttactgaggggaaaatcaatccactattggatgaaccattgtctcctagcaattagtgccgtatactttaaagcaaaatggttgacgccattcgaaaaggaatttaccagtgattatcccttttacgtatctccgacggaaatggtagacgtaagtatgatgtctatgtacggcaaggcatttaatcacgcatctgtaaaagaatcattcggcaacttttcaatcatagaactgccatatgttggagatactagtatgatggtcattcttccagacaagattgatggattagaatccatagaacaaaatctaacagatacaaattttaagaaatggtgtgactttatggatgctatgtttatagatgttcacattcccaagtttaaggtaacaggctcgtataatctggtggatactctagtaaagtcaggactgacagaggtgttcggttcaactggagattatagcaatatgtgtaatttagatgtgagtgtcgacgctatgatccacaaaacgtatatagatgtcaatgaagagtatacagaagcagctgcagcaacttctgtactagtggcagactgtgcatcaacaattacaaatgagttctgtgcagatcatccgttcatctatgtgattaggcatgttgatggaaaaattcttttcgttggtagatattgctctccgacaactaattgttaaccattttttttaaaaaaaatagaaaaaacatgtggtattagtgcaggtcgttgttcttccaattgcaattggtaagatgacggccaactttagtacccacgtcttttcaccacagcactgtggatgtgacagactgaccagtattgatgacgtcaaacaatgtttgactgaatatatttattggtcgtcctatgcataccgcaacaggcaatgcgctggacaattgtattccacactcctctcttttagagatgatgcggaattagtgttcatcgacattcgcgagctggtaaaaaatatgccgtgggatgatgtcaaagattgtacagaaatcatccgttgttatataccggatgagcaaaaaaccatcagagagatttcggccatcatcggactttgtgcatatgctgctacttactggggaggtgaagaccatcccactagtaacagtctgaacgcattgtttgtgatgcttgagatgctaaattacgtggattataacatcatattccggcgtatgaattgatgagttgtacatcttgacattttctttcttctcttctccctttcttctcttctcccttcctccctcttctccctttcccagaaacaaacttttttacccactataaaataaaatgagtatactacctattatatttcttcctatatttttttattcttcattcgttcagacttttaacgcgtctgaatgtatcgacaaagggcaatattttgcatcattcatggagttagaaaacgagccagtaatcttaccatgtcctcaaataaatacgctatcatccggatataatatattagatattttatgggaaaaacgaggagcggataatgatagaattataccgatagataatggtagcaatatgctaattctgaacccgacacaatcagactctggtatttatatatgcattaccacgaacgaaacctactgtgacatgatgtcgttaaatttgacaatcgtgtctgtctcagaatcaaatatagatcttatctcgtatccacaaatagtaaatgagagatctactggcgaaatggtatgtcccaatattaatgcatttattgctagtaacgtaaacgcagatattatatggagcggacatcgacgccttagaaataagagacttaaacaacggacacctggaattattaccatagaagatgttagaaaaaatgatgctggttattatacatgtgttttagaatatatatacggtggcaaaacatataacgtaaccagaattgtaaaattagaggtacgggatagaataataccttctactatgcaattaccagatggcattgtaacttcaataggtagtaatttgactattgcatgcagagtatcgttgagacctcccacaacggacaccgacgtcttttggataagtaatggtatgtattacgaagaagatgatggggacggaaacggtagaataagtgtagcaaataaaatctatatgaccgataagagacgtgttattacatcccggttaaacattaatcctgtcaaggaagaagatgctacaacgtttacgtgtatggcgtttactattcctagcatcagcaaaacagttactgttagtataacgtgaatgtatgttgttacatttccatgtcaattgagtttataagaatttttatacattatcttccaacaaacaattgacgaacgtattgctatgattaactcccacgatactatgcatattattaatcattaacttgcagactatacctagtgctattttgacatactcgtgttcttgtgtaattgcggtatctatattattaaagtacgtaaatctagctatagttttattatttaattttagataatataccgtctccttatttttaaaaattgccacatcctttattaaatcatgaatgggaatttctatgtcatcgttagtatattgtgaacaacaagagcagatatctataggaaagggtggaatgcgatacattgatctatgtagttttaaaacacacgcgaactttgaagaatttatataaatcattccatcgatacatccttctatgttgacatgtatatatccaggaattcttttattaatgtcaggaaatgtataaactaaaacattgcccgaaagcggtgcctctatctgcgttatatccgttcttaacttacaaaatgtaaccaatacctttgcatgacttgttttgttcggcaacgttagtttaaacttgacgaatggattaattacaatagcatgatccgcgcatctattaagtttttttactttaacgcccttgtatgtttttacagagactttatctaaatttctagtgcttgtatgtgttataaatataacgggatatagaaccgaatcacctaccttagatacccaattacattttatcagatccagataataaacaaattttgtcgccctaactaattctatattgttatatattttacaattggttatgatatcatgtaataacttggagtctaacgcgcatcgtcgtacgtttatacaattgtgatttagtgtagtatatctacacatgtatttttccgcactatagtattctggactagtgataaaactatcgttatatctgtcttcaatgaactcatcgagatattgctctctgtcatattcatacacctgcataaactttctagacatcttacaatccgtgttattttaggatcatatttacatatttacgggtatatcaaagatgttagattagttaatgggaatcgtctataataatgaatattaaacaattatatgaggacttttaccacaaagcatcataaaaatgagtcgtcgtctgatttatgttttaaatatcaaccgcaaatcaactcataaaatacaagagaatgaaatatatacatattttagtcattgcaatatagaccatacttctacagaacttgattttgtagttaaaaactatgatctaaacagacgacaacctgtaactgggtatactgcactacactgctatttgtataataattactttacaaacgatgtactgaagatattattaaatcatgacgtaaatgtaacgatgaaaaccagtagcggacgtatgcctgtttatatattgcttactagatgttgtaatatttcacatgatgtagtgatagatatgatagacaaagataaaaaccacttattacatagagactattccaacctattactagagtatataaaatctcgttacatgttattgaaggaagaggatatcgatgagaacatagtatccactttattagataagggaatcgatcctaactttaaacaagacggatatacagcgttacattattattatttgtgtctcgcacacgtttataaactaggtgagtgtagaaaaccgataacgataaaaaaggccaagcgaattatttctttgtttatacaacatggagctaatctaaacgcgttagataattgtggtaatacaccattccatttgtatcttagtattgaaatgtgtaataatattcatatgactaaaatgctgttgacttttaatccgaatttcaaaatatgtaataatcatggattaacgcctatactatgttatataacttccgactacatacaacacgatattcttgttatgttaatacatcactatgaaacaaatgttggagaaatgccgatagatgagcgtcgtatgatcgtattcgagtttatcaaaacatattctacacgtccggcagattcgataacttatttgatgaataggtttaaaaatataaatatttatacccgctatgaaggaaagacattattacacgtagcatgtgaatataataatacacaagtaatagattatcttatacgtatcaacggagatataaatgcgttaaccgacaataacaaacacgctacacaactcattatagataacaaagaaaattccccatataccattaattgtttactgtatatacttagatatattgtagataagaatgtgataagatcgttggtggatcaacttccatctctacctatcttcgatataaaatcatttgagaaattcatatcctactgtatacttttagatgacacattttacgataggcacgttaagaatcgcgattctaaaacgtatcgatacgcattttcaaaatacatgtcgtttgataaatacgatggtataataactaaatgtcacgacgaaacaatgttactcaaactgtccactgttctagacactacactatatgcagttttaagatgtcataattcgagaaagttaagaagatacctcaacgagttaaaaaaatataataacgataagtcctttaaaatatattctaatattatgaatgagagataccttaatgtatattataaagatatgtacgtgtcaaaggtatatgataaactatttcctgttttcacagataaaaattgtctactaacattactaccttcagaaattatatacgaaatattatacatgctgacaattaacgatctttataatatatcgtatccacctaccaaagtatagttgtatttttctcatgcgatgtgtgtaaaaaaactgatattatataaatattttagtgccgtataataaagatgacgatgaaaatgatggtacatatatatttcgtatcattattgttattgctattccacagttacgccatagacatcgaaaatgaaatcacagaattcttcaataaaatgagagatactctaccagctaaagactctaaatggttgaatccagcatgtatgttcggaggcacaatgaatgatatagccgctctaggagagccattcagcgcaaagtgtcctcctattgaagacagtcttttatcgcacagatataaagactatgtggttaaatgggagaggctagaaaagaatagacggcgacaggtttctaataaacgtgttaaacatggtgatttatggatagccaactatacatctaaattcagtaaccgtaggtatttgtgcaccgtaactacaaagaatggtgactgtgttcagggtatagttagatctcatattaaaaaacctccttcatgcattccaaaaacatatgaactaggtactcatgataagtatggcatagacttatactgtggaattctttacgcaaaacattataataatataacttggtataaagataataaggaaattaatatcgacgacattaagtattcacaaacgggaaaggaattaattattcataatccagagttagaagatagcggaagatacgactgttacgttcattacgacgacgttagaatcaagaatgatatcgtagtatcaagatgtaaaatacttacggttataccgtcacaagaccacaggtttaaactaatactagatccgaaaatcaacgtaacgataggagaacctgccaatataacatgcactgctgtgtcaacgtcattattgatcgacgatgtactgattgaatgggaaaatccatccggatggcttataggattcgattttgatgtatactctgttttaactagtagaggcggtatcaccgaggcgaccttgtactttgaaaatgttactgaagaatatataggtaatacatataaatgtcgtggacacaactattattttgaaaaaacccttacaactacagtagtattggagtaaatatacaatgcatttttatatacattactgaattattattactgaattattattactgaattattattaattatatcgtatttgtgctatagaatggatgaagatacgcgactatctaggtatttgtatctcaccgatagagaacatataaatgtagactctattaaacagttgtgtaaaatatcagatcctaatgcatgttatagatgtggatgtacggctttacatgagtacttttataattatagatcagtcaacggaaaatacaagtatagatacaacggttactatcaatattattcatctagcgattatgaaaattataatgaatattattatgatagaactggtatgaacagtgagagtgataatatatcaatcaaaacagaatatgaattctatgatgaaacacaagatcaaagtacacaactagtaggttacgacattaaactcaaaaccaatgaggatgattttatggctatgatagatcagtgggtgtccatgattatatagatgaatcaattaataaagtagtatatggaagagagtctcacgtaagatggcgggatatatggcaagaacataatgatggcgtatacagtataggaaaggagtgcatagataatatatacgaagacaaccataccgtagacgaattctacaagatagacagcgtatcagatgtagatgacgcggaacacatatctccgataactaaaaaaccatagaatcagttgatgataatacctacatttctaatcttccgtataccatcaaatacaaaatattcgagcaacaataagtattttttatacctttaaaactgataaataaattttttctagtgatattttggcaagatgagaatcctatttctcatcgctttcatgtatgggtgtgttcactcatatgttaacgcggttgaaaccaaatgtccaaatctagacattgtaacatcttctggagaatttcattgttcaggatgtgtggaacatatgcctgagtttagctatatgtattggttggcaaaggatatgaaatcggacgaggataccaagtttatagaacatctgggtgatggcatcaaagaagatgaaaccgttcgtaccacagatagtggaatcgtcactctacgtaaagtccttcatgtgactgatactaataaatttgataattataggttcacttgtgtcctcgctacgctagatggcatttataaaaagaatgtttgctgaagtagttgtgtgctactatttttatttatgatataatctaatggaattaatttgaattgatatttatccaatactaaagattatattagaatcaaattaatcttttatacgagaaaaaataacgacatacgtcgtcaacaaattaaactttttatttattagttaactagcttatagaacttgctcattgttatgtttctaaaacgggtacggcatataggacaattatccgacgcaccggtttctcttcgtgttctatgccatatattgatgcatgttatgcaaaatatatgagtacacgaatccaataaaccaaagtatctatcgttttgagtaaacaacttcatagcaaattccacattctttttctttacttactctatacacgtcctcgtatttatttagtattttgatgatatccaactcagaaatggttgttgtattattgggtgtatttggagtataggtattattagctatgtaccaatttaccaaccctcttaatattgattgataatcacatcggttatccaattaataactaaattgtagtgtatatatagaccatatatgtttctatttttttgacagttacgtatagtttcagtaagttttgattgttgtattcctgtatctctagataagttagtcatatagtcccttccggcgatacgttttttccaagcccgaaattgattagccaaatgtgtatttatttttgtgatattgatataatatttcggataatgcatactgttagtcttatatcatttggttcatctatgtattgtaatattgttacatgatctatagatgatgtattgattttggcaggatcgaattccatatccgcgactaaacagtgaaaaaaatgtaaatactttttaaattttaaattagtaaaacttttttttattttttatgattccaaaaatactgaatacaaagtcctaaattataaatatggagatcatactaccacaacttattattatgtatacaaggccggtgtaatagatagatatatataattctattacaccggcagacaattaccgaccggtatttgtcgttaccaacataccgtataatatgtaatatacaattccataacccattgacagttgttatacatcaaaattgcaattcttttgattacgatgttataagaatgtagttaattgatgtatgatgttaatgtgtcctctttcctcttataacatcgtaatcaaaaacttttttataatatatacctaataatgtgtcttaatagttctcgtgattcgtcaaacaatcattcttataaaatataataaagcaacgtaaaaacacataaaaataagcgtaactaataagacaatggatatttacgacgataaaggtctacagactattaaactgtttaataatgaatttgattgtataaggaatgacatcagagaattatttaaacatgtaactgattccgatagtatacaacttccgatggaagacaattctgatattatagaaaatatcagaaaaatactatatagacgattaaaaaatgtagaatgtgttgacatcgataacacaataacttttatgaaatacgatccaaatgatgataataagcgtacgtgttctaattgggtacccttaactaataactatatggaatattgtctagtaatatatttggaaacaccgatatgtggaggcaaaataaaattataccaccctacaggaaatataaagtcggataaggatattatgtttgcaaagactctagactttaaatcaacgaaagtgttaactggacgtaaaacaattgccgttctagacatatccgtttcatataatagatcaatgactactattcactacaacgacgacgttgatatagatatacatactgataaaaatggaaaagagttatgttattgttatataacaatagatgatcattacttggttgatgtggaaactataggagttatagtcaatagatctggaaaatgtctgttagtaaataaccatctaggtataggtatcgttaaagataaacgtataagcgatagttttggagatgtatgtatggatacaatatttgacttttctgaagcacgagagttattttcattaactaatgatgataacaggaatatagcatgggacactgataaactagacgatgatacagatatatggactcccgtcacagaagatgattacaaatttctttctagactagtattgtatgcaaaatctcaatcggatactgtatttgactattatgttcttactggtgatacggaaccacccactgtattcattttcaaggtaactagattttactttaatatgccgaaataaaaaatttttgtataatatctagaggtagaggtattgtttagataaatacaaataacatagatacatcgcatacttagcatttttataaatatacataagacatacactttatacatttttgtaaaaatactcataaaaaaatttataaaaattatggcacaaccatatcttgtataggtagtttagttcgtcgagtgaacctataaacagataatagacaacacataataatgcctactaatacaagcataataccgggagatgggatatatgacgttgtagtgtttgggttttctgaacgttgatagtctactaatactacatgctgacatctaatgcctgtataaccatgagagcatctacaatacataccgtcaatatctctagcgtggatacagtcaccgtgtaaacaatatccatctccctctggaccgcataatctgatagctggaatatctgttgtagcgtttgtaatttctggcaatgtcgtttcgatagcgttaccactatcggcgaatgatctgattatcatagcagcgaacaacaacatcagataatttatcaacatttttgatggattctgtgtttatgctgtttctcagtgtgtgtttatgacaagattgggaattttatattattaattcagtaatataaactaataatatattgttaattgtgtaaataatataaaaataacaatacaatattgaatgtgttgctgttaaaaatgtatgtgttaatataatagaataaaataaatgagtatgatcattttagataacgattgattttatcattaccgcttcattcttatattctttgcttacggaacctatatttagaaacatctactaacaattttttatgcttgcattattaatggtatgtaatatgattgattgtgtacgcaataccaatttgttaagtatgaatacggggtacaaacataaattgaaatttaacattatttatttatgatatatatcgttatcgttaggtctataccatggatatctttaaagaactaatcttaaaacaccctgatgaaaatgttttgatttctccagtttccattttatctactttatctattctaaatcatggagcagctggttctacagctgaacaactatcaaaatatatagagaatatgaatgagaatacacccgatgacaataatgatgacatggaggtagatattccgtattgtgcgacactagctaccgcaaataaaatatacggtagcgatagtatcgagttccacgcctccttcctacaaaaaataaaagacgattttcaaactgtaaactttaataatgctaaccaaacaaaggaactaatcaacgaatgggttaagacaatgacaaatggtaaaattaattccttattgactagtccgctatccattaatactcgtatgacagttgttagcgccgtccattttaaagcaatgtggaaatatccattttctaaacatcttacatatacagacaagttttatatttctaagaatatagttaccagcgttgatatgatggtgggtaccgagaataacttgcaatatgtacatattaatgaattattcggaggattctctattatcgatattccatacgagggaaactctagtatggtaattatactaccggacgacatagaaggtatatataacatagaaaaaaatataacagatgaaaaatttaaaaaatggtgtggtatgttatctactaaaagtatagacttgtatatgccaaagtttaaagtggaaatgacagaaccgtataatctggtaccgattttagaaaatttaggacttactaatatattcggatattatgcagattttagcaagatgtgtaatgaaactatcactgtagaaaaatttctacatacgacgtttatagatgttaatgaggagtatacagaagcatcggccgttacaggagtatttacgattaacttttcgatggtatatcgtacgaaggtctacataaaccatccattcatgtacatgattaaagacaccacaggacgtatactttttatagggaaatactgctatccgcaataaatataaacaaatagacttttataaagagtcttcaacgataagtatatcgacatactacttatgctgcgaaagattctgaacgagaacgactatctcaccctcttggatcatatccgcactgctaaatactaaatctccactacactttttatcatcttatgaggaatgattgccttcgtgaaataggaataattagcaccagaatagctatggattattgtggtagagagtgcactattctatgtcgtctactggatgaagatgtgacgtacaaaaaaataaaactagaaattgaaacgtgtcacaacttatcaaaacatatagatagacgaggaaacaatgcgctacattgttacgtctccaataaatgcgatacagacattaagattgttctctcgcggagtcgagagactttgtagaaacaacgaaggattaactccgctaggagtatacagtaagcatagatacgtaaaatctcagattgtgcatctactgatatccagctattcaaattcctctaacgaactcaagtcgaatataaatgatttcgatctgtattcggataatatcgacttacgtctgctaaaatacctaattgtggataaacggatacgtccgtccaagaatacgaattatgcaatcaatggtctcggattggtggatatatacgtaacgacgcctaatccgagaccagaagtattgctatggcttcttaaatcagaatgttacagcaccggttacgtatttcgtacctgtatgtacgacagtgatatgtgtaagaactctcttcattactatatatcgtctcatagagaatctcaatctctatccaaggatgtaattaaatgtttgatcgataacaatgtttccatccatggcagagacgaaggaggatctttacccatccaatactactggtctttctcaaccatagatatagagattgttaaattattattaataaaggatgtggacacgtgtagagtatacgacgtcagccctatattagaggcgtattatctaaacaagcgatttagagtaaccccatataatgtagacatggaaatcgttaatcttcttattgagagacgtcatactcttgtcgacgtaatgcgtagtattacttcgtacgattccagagaatataaccactacatcatcgataacattctaaagagatttagacaacaggatgaatccatcgtacaagccatactgataaactacttacattacggcgatatggtcgttcgatgcatgttagataacggacaacaactatcctctacacgactactttgttaataataatctcgtcgatgtaaacgtcgtaaggtttatcgtggaaaatatggacacgcggctgtaaatcacgtatcgaacaatggccgtctatgtatgtacggtctgatattatcgagatttaataattgcgggtatcactgttatgaaaccatactgatagatgtatttgatatactaagcaagtacatggatgatatagatatgatcgataactctactatattacgcggtcgatgtcaataatatacaatttgcaaagcggttattggaatatggagcgagtatcacgctcgataatcaatacggccatccagaaaagcagttacagaagagaaaacaaaacgaaatcgttgttctacaagatgtctctccctacgacgattactacgtaaaaaagatactagcctactgcctattaagggacgagtcattcgcggaactacatagtaaattctgtttaaacgaggactataaaagtgtatttatgaaaaatatatcattcgataagatagattccatcatcgtgacataagtcgcctcaaagagattcgaatctccgacaccgacctgtatacggtatcacagctatcttaaagccatacattcagacagtcacatttcatttcccatgtacgacgatctcatagaacagtgccatctatcgatggagcgtaaaagtaaactcgtcgacaaagcactcaataaattagagtctaccatcggtcaatctagactatcgtatttgcctccggaaattatgcgcaatatcatctaaacagtatgttgtacggaaagaaccattacaaatattatccatgatagaaagaaaatatctatatgattggagaagtaggaaacaggaacaagacaacgattactacattattaaatcatgaagtccgtattatactcgtatatattgtttctctcatgtataataataaacggaagagatatagcaccgcatgcaccatccgatggaaagtgtaaagacaacgaatacaaacgccataatttgtgtccgggaacatacgcttccagattatgcgatagcaagactaacacacgatgtacgccgtgtggttcgggtaccttcacatctcgcaataatcatttacccgcttgtctaagttgtaacggaagacgcgatcgtgtaacacgactcacaatagaatctgtgaatgctctcccggatattattgtcttctcaaaggatcatccggatgcaaggcatgtgtttcccaaacaaaatgtggaataggatacggagtatccggagacgtcatctgttctccgtgtggtctcggaacatattctcacaccgtctcttccgcagataaatgcgaacccgtacccagaaatacgtttaactatatcgatgtggaaattaacctgtatccagttaacgacacgtcgtgtactcggacgaccactaccggtctcagcgaatccatctcaacgtcggaactaactattactatgaatcataaagactgtaatcccgtatttcgtgatggatacttctccgttcttaataaggtagcgacttcaggtttctttacaggagaaaggtgtgcactctgaatttcgagattaaatgcaataacaaagattcttcctccaaacagttaacgaaagcaaagaatgatactatcatgccgcattcggagacagtaactctagtgggcgacatctatatactatatagtaataccaatactcaagactacgaaactgatacaatctcttatcatgtgggtaatgttctcgatgtcgatagccatatgcccggtagttgcgatatacataaactgatcactaattccaaacccacccactttttatagtaagtttttcacccataaataataaatacaataattaatttctcgtaaaagtagaaaatatattctaatttattgcacggtaaggaagtagaatcataaagaacagtactcaatcaatagcaattatgaaacaatatatcgtcctggcatgcatgtgcctggcggcagctgctatgcctgccagtcttcagcaatcatcctcatcctcctcctcgtgtacggaagaagaaaacaaacatcatatgggaatcgatgttattatcaaagtcacaaagcaagaccaaacaccgaccaatgataagatttgccaatccgtaacggaaattacagagtccgagtcagatccagatcccgaggtggaatcagaagatgattccacatcagtcgaggatgtagatcctcctaccacttattactccatcatcggtggaggtctgagaatgaactttggattcaccaaatgtcctcagattaaatccatctcagaatccgctgatggaaacacagtgaatgctagattgtccagcgtgtccccaggacaaggtaaggactctcccgcgatcactcatgaagaagctcttgctatgatcaaagactgtgaagtgtctatcgacatcagatgtagcgaagaagagaaagacagcgacatcaagacccatccagtactcgggtctaacatctctcataagaaagtgagttacgaagatatcatcggttcaacgatcgtcgatacaaaatgcgtcaagaatctagagtttagcgttcgtatcggagacatgtgcaaggaatcatctgaacttgaggtcaaggatggattcaagtatgtcgacggatcggcatctgaaggtgcaaccgatgatacttcactcatcgattcaacaaaactcaaagcgtgtgtctgaatcgataactctattcatctgaaattggatgagtagggttaatcgaacgattcaggcacaccacgaattaaaaaagtgtaccggacactatattccggtttgcaaaacaaaaatgttcttaactacattcacaaaaagttacctctcgcgacttcttctttttctgtctcaatagtgtgatacgattatgacactattcctattcctattcctatttcctttcagagtatcacaaaaatattaaacctctttctgatggtctcataaaaaaagttttacaaaaatatttttattctctttctctctttgatggtctcataaaaaaagttttacaaaaatatttttattctctttctctctttgatggtctcataaaaaaagttttacaaaaatatttttattctctttctctctttgatggtctcataaaaaaagttttacaaaaatatttttattctctttctctctttgatggtctcataaaaaaagttttacaaaaatatttttattctctttctctctttgatggtctcataaaaaaagttttacaaaaatatttttattctctttctctctttgatggtctcataaaaaaagttttacaaaaatatttttattctctttctctctttgatggtctcataaaaaaagttttacaaaaatatttttattctctttctctctttgatggtctcataaaaaaagttttacaaaaatatttttattctctttctctctttgatggtctcataaaaaaagttttacaaaaatatttttattctctttctctctttgatggtctcataaaaaaagttttacaaaaatatttttattctctttctctctttgatggtctcataaaaaaagttttacaaaaatatttttattctctttctctctttgatggtctcataaaaaagttttacaaaaatatttttattctctttctctctttgatggtctcataaaaaagttttacaaaaatatttttattctctttctctctttgatggtctcataaaaaaagttttacaaaaatatttttattctctttctctctttgatggtctcataa

SEQ ID NO: 23 - DNA, 199502 bp, Artificial Sequence
  GLV-1h254
ttatgagaccatcaaagagagaaagagaataaaaatatttttgtaaaactttttttatgagaccatcaaagagagaaagagaataaaaatatttttgtaaaacttttttatgagaccatcaaagagagaaagagaataaaaatatttttgtaaaacttttttatgagaccatcaaagagagaaagagaataaaaatatttttgtaaaactttttttatgagaccatcaaagagagaaagagaataaaaatatttttgtaaaactttttttatgagaccatcaaagagagaaagagaataaaaatatttttgtaaaactttttttatgagaccatcaaagagagaaagagaataaaaatatttttgtaaaactttttttatgagaccatcaaagagagaaagagaataaaaatatttttgtaaaactttttttatgagaccatcaaagagagaaagagaataaaaatatttttgtaaaactttttttatgagaccatcaaagagagaaagagaataaaaatatttttgtaaaactttttttatgagaccatcaaagagagaaagagaataaaaatatttttgtaaaactttttttatgagaccatcaaagagagaaagagaataaaaatatttttgtaaaactttttttatgagaccatcaaagagagaaagagaataaaaatatttttgtaaaactttttttatgagaccatcaaagagagaaagagaataaaaatatttttgtaaaactttttttatgagaccatcaaagagagaaagagaataaaaatatttttgtaaaactttttttatgagaccatcagaaagaggtttaatatttttgtgatactctgaaaggaaataggaataggaataggaatagtgtcataatcgtatcacactattgagacagaaaaagaagaagtcgcgagaggtaactttttgtgaatgtagttaagaacatttttgttttgcaaaccggaatatagtgtccggtacacttttttaattcgtggtgtgcctgaatcgttcgattaaccctactcatccaatttcagatgaatagagttatcgattcagacacacgctttgagttttgttgaatcgatgagtgaagtatcatcggttgcaccttcagatgccgatccgtcgacatacttgaatccatccttgacctcaagttcagatgattccttgcacatgtctccgatacgaacgctaaactctagattcttgacgcattttgtatcgacgatcgttgaaccgatgatatcttcgtaactcactttcttatgagagatgttagacccgagtactggatgggtcttgatgtcgctgtctttctcttcttcgctacatctgatgtcgatagacacttcacagtctttgatcatagcaagagcttcttcatgagtgatcgcgggagagtccttaccttgtcctggggacacgctggacaatctagcattcactgtgtttccatcagcggattctgagatggatttaatctgaggacatttggtgaatccaaagttcattctcagacctccaccgatgatggagtaataagtggtaggaggatctacatcctcgactgatgtggaatcatcttctgattccacctcgggatctggatctgactcggactctgtaatttccgttacggattggcaaatcttatcattggtcggtgtttggtcttgctttgtgactttgataataacatcgattcccatatgatgtttgttttcttcttccgtacacgaggaggaggatgaggatgattgctgaagactggcaggcatagcagctgccgccaggcacatgcatgccaggacgatatattgtttcataattgctattgattgagtactgttctttatgattctacttccttaccgtgcaataaattagaatatattttctacttttacgagaaattaattattgtatttattatttatgggtgaaaaacttactataaaaagtgggtgggtttggaattagtgatcagtttatgtatatcgcaactaccgggcatatggctatcgacatcgagaacattacccacatgataagagattgtatcagtttcgtagtcttgagtattggtattactatatagtatatagatgtcgcccactagagttactgtctccgaatgcggcatgatagtatcattctttgctttcgttaactgtttggaggaagaatctttgttattgcatttaatctcgaaattcagagtgcacacctttctcctgtaaagaaacctgaagtcgctaccttattaagaacggagaagtatccatcacgaaatacgggattacagtctttatgattcatagtaatagttagttccgacgttgagatggattcgctgagaccggtagtggtcgtccgagtacacgacgtgtcgttaactggatacaggttaatttccacatcgatatagttaaacgtatttctgggtacgggttcgcatttatctgcggaagagacggtgtgagaatatgttccgagaccacacggagaacagatgacgtctccggatactccgtatcctattccacattttgtttgggaaacacatgccttgcatccggatgatcctttgagaagacaataatatccgggagagcattcacagattctattgtgagtcgtgttacacgatcgcgtcttccgttacaacttagacaagcgggtaaatgattattgcgagatgtgaaggtacccgaaccacacggcgtacatcgtgtgttagtcttgctatcgcataatctggaagcgtatgttcccggacacaaattatggcgtttgtattcgttgtctttacactttccatcggatggtgcatgcggtgctatatctcttccgtttattattatacatgagagaaacaatatatacgagtataatacggacttcatgatttaataatgtagtaatcgttgtcttgttcctgtttcctacttctccaatcatatagatattttctttctatcatggataatatttgtaatggttctttccgtacaacatactgtttagatgatattgcgcataatttccggaggcaaatacgatagtctagattgaccgatggtagactctaatttattgagtgctttgtcgacgagtttacttttacgctccatcgatagatggcactgttctatgagatcgtcgtacatgggaaatgaaatgtgactgtctgaatgtatggctttaagatagctgtgataccgtatacaggtcggtgtcggagattcgaatctctttgaggcgacttatgtcacgatgatggaatctatcttatcgaatgatatatttttcataaatacacttttatagtcctcgtttaaacagaatttactatgtagttccgcgaatgactcgtcccttaataggcagtaggctagtatcttttttacgtagtaatcgtcgtagggagagacatcttgtagaacaacgatttcgttttgttttctcttctgtaactgcttttctggatggccgtattgattatcgagcgtgatactcgctccatattccaataaccgctttgcaaattgtatattattgacatcgaccgcgtaatatagtagagttatcgatcatatctatatcatccatgtacttgcttagtatatcaaatacatctatcagtatggtttcataacagtgatacccgcaattattaaatctcgataatatcagaccgtacatacatagacggccattgttcgatacgtgatttacagccgcgtgtccatattttccacgataaaccttacgacgtttacatcgacgagattattattaacaaagtagtcgtgtagaggatagttgttgtccgttatctaacatgcatcgaacgaccatatcgccgtaatgtaagtagtttatcagtatggcttgtacgatggattcatcctgttgtctaaatctctttagaatgttatcgatgatgtagtggttatattctctggaatcgtacgaagtaatactacgcattacgtcgacaagagtatgacgtctctcaataagaagattaacgatttccatgtctacattatatggggttactctaaatcgcttgtttagataatacgcctctaatatagggctgacgtcgtatactctacacgtgtccacatcctttattaataataatttaacaatctctatatctatggttgagaaagaccagtagtattggatgggtaaagatcctccttcgtctctgccatggatggaaacattgttatcgatcaaacatttaattacatccttggatagagattgagattctctatgagacgatatatagtaatgaagagagttcttacacatatcactgtcgtacatacaggtacgaaatacgtaaccggtgctgtaacattctgatttaagaagccatagcaatacttctggtctcggattaggcgtcgttacgtatatatccaccaatccgagaccattgattgcataattcgtattcttggacggacgtatccgtttatccacaattaggtattttagcagacgtaagtcgatattatccgaatacagatcgaaatcatttatattcgacttgagttcgttagaggaatttgaatagctggatatcagtagatgcacaatctgagattttacgtatctatgcttactgtatactcctagcggagttaatccttcgttgtttctacaaagtctctcgactccgcgagagaacaatcttaatgtctgtatcgcatttattggagacgtaacaatgtagcgcattgtttcctcgtctatctatatgttttgataagttgtgacacgtttcaatttctagttttatttttttgtacgtcacatcttcatccagtagacgacatagaatagtgcactctctaccacaataatccatagctattctggtgctaattattcctatttcacgaaggcaatcattcctcataagatgataaaaagtgtagtggagatttagtatttagcagtgcggatatgatccaagagggtgagatagtcgttctcgttcagaatctttcgcagcataagtagtatgtcgatatacttatcgttgaagactctttataaaagtctatttgtttatatttattgcggatagcagtatttccctataaaaagtatacgtcctgtggtgtctttaatcatgtacatgaatggatggtttatgtagaccttcgtacgatataccatcgaaaagttaatcgtaaatactcctgtaacggccgatgcttctgtatactcctcattaacatctataaacgtcgtatgtagaaatttttctacagtgatagtttcattacacatcttgctaaaatctgcataatatccgaatatattagtaagtcctaaattttctaaaatcggtaccagattatacggttctgtcatttccactttaaactttggcatatacaagtctatacttttagtagataacataccacaccattttttaaatttttcatctgttatatttttttctatgttatatataccttctatgtcgtccggtagtataattaccatactagagtttccctcgtatggaatatcgataatagagaatcctccgaataattcattaatatgtacatattgcaagttattctcggtacccaccatcatatcaacgctggtaactatattcttagaaatataaaacttgtctgtatatgtaagatgtttagaaaatggatatttccacattgctttaaaatggacggcgctaacaactgtcatacgagtattaatggatagcggactagtcaataaggaattaattttaccatttgtcattgtcttaacccattcgttgattagttcctttgtttggttagcattattaaagtttacagtttgaaaatcgtcttttattttttgtaggaaggaggcgtggaactcgatactatcgctaccgtatattttatttgcggtagctagtgtcgcacaatacggaatatctacctccatgtcatcattattgtcatcgggtgtattctcattcatattctctatatattttgatagttgttcagctgtagaaccagctgctccatgatttagaatagataaagtagataaaatggaaactggagaaatcaaaacattttcatcagggtgttttaagattagttctttaaagatatccatggtatagacctaacgataacgatatatatcataaataaataatgttaaatttcaatttatgtttgtaccccgtattcatacttaacaaattggtattgcgtacacaatcaatcatattacataccattaataatgcaagcataaaaaattgttagtagatgtttctaaatataggttccgtaagcaaagaatataagaatgaagcggtaatgataaaatcaatcgttatctaaaatgatcatactcatttattttattctattatattaacacatacatttttaacagcaacacattcaatattgtattgttatttttatattatttacacaattaacaatatattattagtttatattactgaattaataatataaaattcccaatcttgtcataaacacacactgagaaacagcataaacacagaatccatcaaaaatgttgataaattatctgatgttgttgttcgctgctatgataatcagatcattcgccgatagtggtaacgctatcgaaacgacattgccagaaattacaaacgctacaacagatattccagctatcagattatgcggtccagagggagatggatattgtttacacggtgactgtatccacgctagagatattgacggtatgtattgtagatgctctcatggttatacaggcattagatgtcagcatgtagtattagtagactatcaacgttcagaaaacccaaacactacaacgtcatatatcccatctcccggtattatgcttgtattagtaggcattattatgtgttgtctattatctgtttataggttcactcgacgaactaaactacctatacaagatatggttgtgccataatttttataaatttttttatgagtatttttacaaaaatgtataaagtgtatgtcttatgtatatttataaaaatgctaagtatgcgatgtatctatgttatttgtatttatctaaacaatacctctacctctagatattatacaaaaattttttatttcggcatattaaagtaaaatctagttaccttgaaaatgaatacagtgggtggttccgtatcaccagtaagaacataatagtcaaatacagtatccgattgagattttgcatacaatactagtctagaaagaaatttgtaatcatcttctgtgacgggagtccatatatctgtatcatcgtctagtttatcagtgtcccatgctatattcctgttatcatcattagttaatgaaaataactctcgtgcttcagaaaagtcaaatattgtatccatacatacatctccaaaactatcgcttatacgtttatctttaacgatacctatacctagatggttatttactaacagacattttccagatctattgactataactcctatagtttccacatcaaccaagtaatgatcatctattgttatataacaataacataactcttttccatttttatcagtatgtatatctatatcaacgtcgtcgttgtagtgaatagtagtcattgatctattatatgaaacggatatgtctagaacggcaattgttttacgtccagttaacactttcgttgatttaaagtctagagtctttgcaaacataatatccttatccgactttatatttcctgtagggtggtataattttattttgcctccacatatcggtgtttccaaatatattactagacaatattccatatagttattagttaagggtacccaattagaacacgtacgcttattatcatcatttggatcgtatttcataaaagttattgtgttatcgatgtcaacacattctacattttttaatcgtctatatagtatttttctgatattttctataatatcagaattgtcttccatcggaagttgtatactatcggaatcagttacatgtttaaataattctctgatgtcattccttatacaatcaaattcattattaaacagtttaatagtctgtagacctttatcgtcgtaaatatccattgtcttattagttacgcttatttttatgtgtttttacgttgctttattatattttataagaatgattgtttgacgaatcacgagaactattaagacacattattaggtatatattataaaaaagtttttgattacgatgttataagaggaaagaggacacattaacatcatacatcaattaactacattcttataacatcgtaatcaaaagaattgcaattttgatgtataacaactgtcaatgggttatggaattgtatattacatattatacggtatgttggtaacgacaaataccggtcggtaattgtctgccggtgtaatagaattatatatatctatctattacaccggccttgtatacataataataagttgtggtagtatgatctccatatttataatttaggactttgtattcagtatttttggaatcataaaaaataaaaaaaagttttactaatttaaaatttaaaaagtatttacatttttttcactgtttagtcgcggatatggaattcgatcctgccaaaatcaatacatcatctatagatcatgtaacaatattacaatacatagatgaaccaaatgatataagactaacagtatgcattatccgaaatattatatcaatatcacaaaaataaatacacatttggctaatcaatttcgggcttggaaaaaacgtatcgccggaagggactatatgactaacttatctagagatacaggaatacaacaatcaaaacttactgaaactatacgtaactgtcaaaaaaatagaaacatatatggtctatatatacactacaatttagttattaattggataaccgatgtgattatcaatcaatattaagagggttggtaaattggtacatagctaataatacctatactccaaatacacccaataatacaacaaccatttctgagttggatatcatcaaaatactaaataaatacgaggacgtgtatagagtaagtaaagaaaaagaatgtggaatttgctatgaagttgtttactcaaaacgatagatactttggtttattggattcgtgtactcatatattttgcataacatgcatcaatatatggcatagaacacgaagagaaaccggtgcgtcggataattgtcctatatgccgtacccgttttagaaacataacaatgagcaagttctataagctagttaactaataaataaaaagtttaatttgttgacgacgtatgtcgttattttttctcgtataaaagattaatttgattctaatataatctttagtattggataaatatcaattcaaattaattccattagattatatcataaataaaaatagtagcacacaactacttcagcaaacattctttttataaatgccatctagcgtagcgaggacacaagtgaacctataattatcaaatttattagtatcagtcacatgaaggactttacgtagagtgacgattccactatctgtggtacgaacggtttcatcttctttgatgccatcacccagatgttctataaacttggtatcctcgtccgatttcatatcctttgccaaccaatacatatagctaaactcaggcatatgttccacacatcctgaacaatgaaattctccagaagatgttacaatgtctagatttggacatttggtttcaaccgcgttaacatatgagtgaacacacccatacatgaaagcgatgagaaataggattctcatcttgccaaaatatcactagaaaaaatttatttatcagttttaaaggtataaaaaatacttattgttgctcgaatattttgtatttgatggtatacggaagattagaaatgtaggtattatcatcaactgattctatggttttatgtattctatcatgtttcactattgcgttggaaataatatcatatgcttccacatatattttattttgttttaactcataatactcacgtaattctggattattggcatatctatgaataattttagctccatgatcagtaaatattaatgagaacatagtattaccacctaccattatttttttcatctcattcaattcttaattgcaaagatctatataatcattatagcgttgacttatggactctggaatcttagacgatgtacagtcatctataatcatggcatatttaatacattgttttatagcatagtcgttatctacgatgttagatatttctctcaatgaatcaatcacacaatctaatgtaggtttatgacataatagcattttcagcagttcaatgtttttagattcgttgatggcaatggctatacatgtatatccgttatttgatctaatgttgacatctgaaccggattctagcagtaaagatactagagattgtttattatatctaacagccttgtgaagaagtgtttctcctcgtttgtcaatcatgttaatgtctttaagataaggtaggcaaatgtttatagtactaagaattgggcaagcataagacatgtcacaaagacccttttttgtatgtataagtgtaaaaattataacatccatagttggatttacataggtgtccaatcgggatctctccatcatcgagataattgatggcatctcccttccttttttagtagatatttcatcgtgtaagaatcaatattaatatttctaaagtatccgtgtatagcctctttatttaccacagctccatattccactagagggatatcgccgaatgtcatatactcaattagtatatgttggaggacatccgagttcattgttttcaatatcaaagagatggtttccttatcatttctccatagtggtacaatactacacattattccgtgcggctttccattttccaaaaacaatttgaccaaatctaaatctacatctttattgtatctataatcactatttagataatcagccataattcctcgagtgcaacatgttagatcgtctatatatgaataagcagtgttatctattcctttcattaacaatttaacgatgtctatatctatatgagatgacttaatataatattgaagagctgtacaatagtttttatctataaaagacggcttgattccgtgattaattagacatttaacaacttccggacgcacatatgctctcgtatccgactctgaatacagatgagagatgatatacagatgcaatacggtaccgcaatttcgtagttgataatcatcatacgcgtatcagtactcgtcctcataaagaacactgcagccattttctatgaacaaatcaataattttagaaacaggatcattgtcattacataattttctataactgaacgatggttttcacatttaacactcaagtcaaatccatgttctaccaacacctttatcaagtcaacgtctacatttttggatttcatatagctgaatatattaaagttatttatgttgctaaatccagtggcttctagtagagccatcgctatatccttattaactttaacatgtctactatttgtgtattcttctaatggggtaagctgtctccaatttttgcgtaatggattagtgccactgtctagtagtagtttgacgacctcgacattattacaatgctcattaaaaaggtatgcgtgtaaagcattattcttgaattggttcctggtatcattaggatctctgtctttcaacatctgtttaagttcatcaagagccacctcctcattttccaaatagtcaaacattttgactgaatgagctactgtgaactctatacacccacacaactaatgtcattaaatatcatgtcaaaaacttgtacaattattaataaaaataatttagtgtttaaattttaccagttccagattttacacctccgttaatacctccattaaccccactggacgatcctcctccccacattccaccgccaccagatgtataagttttagatcctttattactaccatcatgtccatggataaagacactccacatgccgccactaccccctttagaagacatattaataagacttaaggacaagtttaacaataaaattaatcacgagtaccctactaccaacctacactattatatgattatagtttctatttttacagtaccttgactaaagtttctagtcacaagagcaatactaccaacctacactattatatgattatagtttctatttttataggaacgcgtacgagaaaatcaaatgtctaatttctaacggtagtgttgataaacgattgttatccgcggatacctcctctatcatgtcgtctattttcttactttgttctattaacttattagcattatatattatttgattataaaacttatattgcttattagcccaatctgtaaatatcggattattaacatatcgtttctttgtaggtttatttaacatgtacatcactgtaagcatgtccttaccatttattttaatttgacgcatatccgcaatttctttttcgcagtcggttataaattctatatatgatggatacatgctacatgtgtacttataatcgactaatatgaagtacttgatacatattttcagtaacgatttattattaccacctatgaataagtacctgtgatcgtctaggtaatcaactgttttcttaatacattcgatggttggtaatttactcagaataatttccaatatcttaatatataattctgctatttctgggatatatttatctgccagtataacacaaatagtaatacatgtaaacccatattttgttattatattaatgtctgcgccattatctattaaccattctactaggctgacactatgcgactcaatacaatgataaagtatactacatccatgtttatctattttgtttatatcatcaatatacggcttacaaagttttagtatcgataacacatccaactcacgcatagagaaggtagggaataatggcataatatttattaggttatcatcattgtcattatctacaactaagtttccattttttaaaatatactcgacaactttaggatctctattgccaaatttttgaaaatatttatttatatgcttaaatctatataatgtagctccttcatcaatcatacatttaataacattgatgtatactgtatgataagatacatattctaacaatagatcttgtatagaatctgtatatcttttaagaattgtggatattaggatattattacataaactattacacaattctaaaatataaaacgtatcacggtcgaataatagttgatcaactatataattatcgattttgtgatttttcttcctaaactgtttacgtaaatagttagatagaatattcattagttcatgaccactatagttactatcgaataacgcgtcaaatatttcccgtttaatatcgcatttgtcaagataataatagagtgtggtatgttcacgataagtataataacgcatctctttttcgtgtgaaattaaatagtttattacgtccaaagatgtagcataaccatcttgtgacctagtaataatataataatagagaactgttttacccattctatcatcataatcagtggtgtagtcgtaatcgtaatcgtctaattcatcatcccaattataatattcaccagcacgtctaatctgttctattttgatcttgtatccatactgtatgttgctacatgtaggtattcctttatccaataatagtttaaacacatctacattgggatttgatgttgtagcgtatttttctacaatattaataccatttttgatactatttatttctatacctttcgaaattagtaatttcaataagtctatattgatgttatcagaacatagatattcgaatatatcaaaatcattgatatttttatagtcgactgacgacaataacaaaatcacaacatcgtttttgatattattatttttcttggtaacgtatgcctttaatggagtttcaccatcatactcatataatggatttgcaccactttctatcaatgattgtgcactgctggcatcgatgttaaatgttttacaactatcatagagtatcttatcgttaaccatgattggttgttgatgctatcgcattttttggtttctttcatttcagttatgtatggatttagcacgtttgggaagcatgagctcatatgatttcagtactgtagtgtcagtactattagtttcaataagatcaatctctagatctatagaatcaaaacacgataggtcagaagataatgaatatctgtaggcttcttgttgtactgtaacttctggttttgttagatggttgcatcgtgctttaacgtcaatggtacaaattttatcctcgctttgtgtatcatattcgtccctactataaaattgtatattcagattatcatgcgatgtgtatacgctaacggtatcaataaacggagcacaccatttagtcataaccgtaatccaaaaatttttaaagtatatcttaacgaaagaagttgtgtcattgtctacggtgtatggtactagatcctcataagtgtatatatctagagtaatgtttaatttattaaatggttgataatatggatcctcgtgacaatttccgaagatggaaataagacataaacacgcaataaatctaattgcggacatggttactccttaaaaaaatacgaataatcaccttggctatttagtaagtgtcatttaacactatactcatattaatccatggactcataatctctatacgggattaacggatgttctatatacggggatgagtagttctcttctttaactttatactttttactaatcatatttagactgatgtatgggtaatagtgtttgaagagctcgttctcatcatcagaataaatcaatatctctgtttttttgttatacagatgtattacagcctcatatattacgtaatagaacgtgtcatctaccttattaactttcaccgcatagttgtttgcaaatacggttaatcctttgacctcgtcgatttccgaccaatctgggcgtataatgaatctaaactttaattgcttgtaatcattcgaaataatttttagtttgcatccgtagttatcccctttatgtaactgtaaatttctcaacgcgatatctccattaataatgatgtcgaattcgtgctgtatacccatactgaatggatgaacgaataccgacggcgttaatagtaatttactttttcatctttacatattgggtactagttttactatcataagtttataaattccacaagctactatggaataagccaaccatcttagtataccacacatgtcttaaagtttattaattaattacatgttgttttatatatatcgctacgaatttaaagagaaattagtttaggaagaaaaattatctatctacatcatcacgtctctgtattctacgatagagtgctactttaagatgcgacagatccgtgtcatcaaatatatactccattaaaatgattattccggcagcgaacttgatattggatatatcacaacctttgttaatatctacgacaatagacagcagtcccatggttccataaacagtgagtttatctttctttgaagagatattttgtagagatcttataaaactgtcgaatgacatcgcatttatatctttagctaaatcgtatatgttaccatcgtaatatctaaccgcgtctatcttaaacgtttccatcgctttaaagacgtttccgatagatggtctcatttcatcagtcatactgagccaacaaatataatcgtgtataacatctttgatagaatcagactctaaagaaaacgaatcggctttattatacgcattcatgataaacttaatgaaaaatgtttttcgttgtttaagttggatgaatagtatgtcttaataattgttattatttcattaattaatatttagtaacgagtacactctataaaaacgagaatgacataactaatcataactagttatcaaagtgtctaggacgcgtaattttcatatggtatagatcctgtaagcattgtctgtattctggagctattttctctatcgcattagtgagttcagaatatgttataaatttaaatcgaataacgaacataactttagtaaagtcgtctatattaactcttttattttctagccatcgtaataccatgtttaagatagtatattctctagttactacgatctcatcgttgtctagaatatcacatactgaatctacatccaattttagaaattggtctgtgttacatatctcttctatattattgttgatgtattgtcgtagaaaactattacgtagaccattttctttataaaacgaatatatagtactccaattatctttaccgatatatttgcacacataatccattctctcaatcactacatctttaagattttcgttgttaagatatttggctaaactatataattctattagatcatcaacagaatcagtatatatttttctagatccaaagacgaactctttggcgtcctctataatattcccagaaaagatattttcgtgttttagtttatcgagatctgatctgttcatatacgccatgattgtacggtacgttatgataaccgcataaaataaaaatccattttcatttttaaccaatactattcataattgagattgatgtaatactttgttactttgaacgtaaagacagtacacggatccgtatctccaacaagcacgtagtaatcaaatttggtgttgttaaacttcgcaatattcatcaatttagatagaaacttatactcatcatctgttttaggaatccatgtattattaccactttccaacttatcattatcccaggctatgtttcgtccatcatcgttgcgcagagtgaataattcttttgtattcggtagttcaaatatatgatccatgcatagatcggcaaagctattgtagatgtgatttttcctaaatctaatataaaactcgtttactagcaaacactttcctgatttatcgaccaagacacatatggtttctaaatctatcaagtggtggggatccatagttatgacgcagtaacatatattattacattcttgactgtcgctaatatctaaatatttattgttatcgtattggattctgcatatagatggcttgtatgtcaaagatatagaacacataaccaatttatagtcgcgctttacattctcgaatctaaagttaagagatttagaaaacattatatcctcggatgatgttatcactgtttctggagtaggatatattaaagtctttacagatttcgtccgattcaaataaatcactaaataatatcccacattatcatctgttagagtagtatcattaaatctattatattttatgaaagatatatcactgctcacctctatatttcgtacatttttaaactgtttgtataatatctctctgatacaatcagatatatctattgtgtcggtagacgataccgttacatttgaattaatggtgttccattttacaacttttaacaagttgaccaattcatttctaatagtatcaaactctccatgattaaatattttaatagtatccattttatatcactacggacacaaagtagctgacataaaccattgtataatttttatgttttatgtttattagcgtacacattttggaagttccggcttccatgtatttcctggagagcaagtagatgatgaggaaccagatagtttatatccgtacttgcacttaaagtctacattgtcgttgtatgagtatgatcttttaaacccgctagacaagtatccgtttgatattgtaggatgtggacatttaacaatctgacacgtgggtggatcggaccattctcctcctgaacacaggacactagagttaccaatcaacgaatatccactattgcaactataagttacaacgctcccatcggtataaaaatcctcgtatccgttatgtcttccgttggatatagatggaggggattggcatttaacagattcacaaataggtgcctcgggattccataccatagatccagtagatcctaattcacaatacgatttagattcaccgatcaactgatatccgctattacaagagtacgttatactagagccaaagtctactccaccaatatcaagttggccattatcgatatctcgaggcgatgggcatctccgtttaatacattgattaaagagtgtccatccagtacctgtacatttagcatatataggtcccattttttgctttctgtatccaggtagacatagatattctatagtgtctcctatgttgtaattagcattagcatcagtctccacactattcttaaatttcatattaatgggtcgtgacggaatagtacagcatgatagaacgcatcctattcccaacaatgtcaggaacgtcacgctctccaccttcatatttatttatccgtaaaaatgttatcctggacatcgtacaaataataaaaagcccatatatgttcgctattgtagaaattgtttttcacagttgctcaaaaacgatggcagtgacttatgagttacgttacactttggagtctcatctttagtaaacatatcataatattcgatattacgagttgacatatcgaacaaattccaagtatttgattttggataatattcgtattttgcatctgctataattaagatataatcaccgcaagaacacacgaacatctttcctacatggttaaagtacatgtacaattctatccatttgtcttccttaactatatatttgtatagataattacgagtctcgtgagtaattccagtaattacatagatgtcgccgtcgtactctacagcataaactatactatgatgtctaggcatgggagacttttttatccaacgatttttagtgaaacattccacatcgtttaatactacatatttctcatacgtggtataaactccacccattacatatatatcatcgtttacgaataccgacgcgcctgaatatctaggagtaattaagtttggaagtcttatccatttcgaagtgccgtgtttcaaatattctgccacacccgttgaaatagaaaattctaatcctcctattacatataactttccatcgttaacacaagtactaacttctgattttaacgacgacatattagtaaccgttttccattttttcgttttaagatctacccgcgatacggaataaacatgtctattgttaatcatgccgccaataatgtatagacaattatgtaaaacatttgcattatagaattgtctatctgtattaccgactatcgtccaatattctgttctaggagagtaatgggttattgtggatatataatcagagtttttaatgactactatattatgttttataccatttcgtgtcactggctttgtagatttggatatagttaatcccaacaatgatatagcattgcgcatagtattagtcataaacttgggatgtaaaatgttgatgatatctacatcgtttggatttttatgtatccactttaataatatcatagctgtaacatcctcatgatttacgttaacgtcttcgtgggataagatagttgtcagttcatcctttgataattttccaaattctggatcggatgtcaccgcagtaatattgttgattatttctgacatcgacgcattatatagttttttaattccatatcttttagaaaagttaaacatccttatacaatttgtgaaattaatattatgaatcatagtttttacacatagatctactacaggcggaacatcaattattatggcagcaactagtatcatttctacattgtttatggtgatgtttatcttcttccagcgcatatagtctaatagcgattcaaacgcgtgatagtttataccattcaatataatcgcttcatcctttagatggtgatcctgaatgcgtttaaaaaaattatacggagacgccgtaataatttccttattcacttgtataatttccccattgatagaaaatattacgctttccattcttaaagtactataagtaattatagtataatgtaaacgtttatatattcaatatttttataaaaatcattttgacattaattcctttttaaatttccgtctatcatctatagaaacgtattctatgaatttataaaatgcttttacgtgtcctatcgtaggcgatagaaccgctaaaaagcctatcgaatttctacaaaagaatctgttatatggtatagggagagtataaaacattaaatgtccgtacttattaaagtattcagtagccaatcctaactctttcgaatacttattaatggctcttgttctgtacgaatctatttttttgaacaacggacctagtggtatatcttgttctatgtatctaaaataatgtctgactagatccgttagtttaatatccgcagtcatcttgtctagaatggcaaatctaactgcgggtttaggctttagtttagtttctatatctacatctatgtctttatctaacaccaaaaatataatagctaatattttattacaatcatccggatattcttctacgatctcactaactaatgtttctttggttatactagtatagtcactatcggacaaataaagaaaatcagatgatcgatgaataatacatttaaattcatcatctgtaagatttttgagatgtctcattagaatattattagggttagtactcattatcattcggcagctattacttattttattatttttcaccatatagatcaatcattagatcatcaaaatatgtttcaatcatcctaaagagtatggtgaatgactcttcccatctaatttctgaacgttcaccaatgtctctagccactttggcactaatagcgatcattcgcttagcgtcttctatattattaactggttgatttaatctatctagcaatggaccgtcggacagcgtcattctcatgttcttaatcaatgtacatacatcgccgtcatctaccaattcatccaacaacataagctttttaaaatcatcattataataggtttgatcgttgtcatttctccaaagaatatatctaataagtagagtcctcatgcttagttaacaactattttttatgttaaatcaattagtacaccgctatgtttaatacttattcatattttagtttttaggattgagaatcaatacaaaaattaatgcatcattaattttagaaatacttagtttccacgtagtcaatgaaacatttgaactcatcgtacaggacgttctcgtacaggacgtaactataaaccggtttatatttgttcaagatagatacaaatccgataactttttttacgaattctacgggatccactttaaaagtgtcataccgggttctttttatttttttaaacagatcaatggtgtgatgttgattaggtcttttacgaatttgatatagaatagcgtttacatattctccataatggtcaatcgccatttgttcgtatgtcataaattctttaattatatgacactgtgtattatttagttcatccttgttcattgttaggaatctatccaaaatggcaattatactagaactataggtgcgttgtatacacatattgatgtgtctgtttatacaatccatgatatttggatccatgctactaccttcgggtaaaattgtagcatcatataccatttctagtactttaggttcattattatccattgcagaggacgtcatgatcgaatcataaaaaaatatattatttttatgttattttgttaaaaataatcatcgaatacttcgtaagatactccttcatgaacataatcagttacaaaacgtttatatgaagtaaagtatctacgatttttacaaaagtccggatgcataagtacaaagtacgcgataaacggaataataatagatttatctagtctatctttttctatagctttcatagttagatacatggtctcagaagtaggattatgtaacatcagcttcgataaaatgactgggttatttagtcttacacattcgctcatacatgtatgaccgttaactacagagtctacactaaaatgattgaacaatagatagtctaccattgtttcgtattcagatagtacagcgtagtacatggcatcttcacaaattatatcattgtctaatagatatttgacgcatcttatggatcccacttcaacagccatcttaaaatcatattgctttcctttatcattaataatttctagaacatcatctctatcataaaagatacaaatattaactgtttgatccgtaataacattgctagtcaatagcaatttgttaataagatgcgctgggctcaatgtcttaataagaagtgtaagaggactatctccgaatttgttttgtttattaacatccgttgatggaagtaaaagatctataatgtctacattcttgactgttttagagcatacaatatggagaggtgtatttccatcatgatctggttttgagggactaattcctagtttcatcatccatgagattgtagaagcttttggattgtctgacataagatgtctatgaatatgatttttgccaaatttatccactatcctggcttcgaatccgatggacattatttttttaaacactctttctgaaggatctgtacacgccaacaacggaccacatccttcttcatcaaccgagttgttaatcttggctccatactgtaccaataaatttattctctctatgacttcatcatctgttcccgagagataatatagaggtgttttatgctgtttatcacacgcgtttggatctgcgccgtgcgtcagcagcatcgcgactattctattattattaattttagaagctatatgcaatggataatttccatcatcatccgtctcatttggagagtatcctctatgaagaagttcttcgacaaatcgttcatctagtcctttaattccacaatacgcatgtagaatgtgataattatttccagaaggttcgatagcttgtagcatattcctaaatacatctaaatttttactattatatttggcataaagagatagataatactcggccgacataatgttgtccattgtagtataaaaattaatatttctatttctatttctgtatatttgcaacaatttactctctataacaaatatcataacttagtttttttatgtcaagaaggcactggtttagttcatctataaatgtcacgccataactaccacgcatgccatactcagaattatgataaagatatttatccttggggtgtaggtaatggggattaatctttgttggatcagtctctaagttaacacatgtcacacatgatccatttatagttatatcacacgatgatgatttatgaattgattccggaagatcgctatcgtattttgtggttccacaattcatttccatacatgttattgtcacactaatattatgatgaactttatctagccgctgagtggtaaacaacagaacagatagtttattatctttaccaacaccctcagccgctgccacaaatctctgatccgtatccatgatggtcatgtttatttctagtccgtatccagtcaacactatgttagcatttctgtcgatatagctttcactcatatgacactcaccaataatagtagaattaatgtcgtaatttacaccaatagtgagttcggcggcaaagtaccaataccggtaatcttgtcgaggaggacatatagtattcttgtattctaccgaatacccgagagatgcgatacaaaagagcaagactaatttgtaaaccatcttactcaaaatatgtaacaatagtacgatgcaatgagtaagacaataggaaatctatcttatatacacataattattctatcaattttaccaattagttagtgtaatgttaacaaaaatgtgggagaatctaattagtttttctttacacaattgacgtacatgagtctgagttccttgtttttgctaattatttcatccaatttattattcttgacgatatcgagatcttttgtataggagtcaaacttgtattcaacatgcttttctataatcattttagctatttcggcatcatccaatagtacattttccagattagcagaatagatattaatgtcgtatttgaacagagcctgtaacatctcaatgtctttattatctatagccaatttaatgtccggaatgaagagaagggaattattggtgtttgtcgacgtcatatagtcgagcaagagaatcatcatatccacgtgtccattttttatagtgatgtgaatacaactaaggagaatagccagatcaaaagtagatggtatctctgaaagaaagtaggaaacaatacttacatcattaagcatgacggcatgataaaatgaagttttccatccagttttcccatagaacatcagtctccaatttttcttaacaaacagttttaccgtttgcatgttaccactatcaaccgcataatacaatgcggtgtttcccttgtcatcaaattgtgaatcatccagtccactgaatagcaaaatctttactattttggtatcttccaatgtggctgcctgatgtaatggaaattcattctctagaagatttttcaatgctccagcgttcaacaacgtacatactagacgcacgttattatcagctattgcataatacaaggcactatgtccatggacatccgccttaaatgtatctttactagagagaaagcttttcagctgcttagacttccaagtattaattcgtgacagatccatgtctgaaacgagacgctaattagtgtatattttttcattttttataattttgtcatattgcaccagaattaataatatctttaatagatctgattagtagatacatggctatcgcaaaacaacatatacacatttaataaaaataatatttattaagaaaattcagatttcacgtacccatcaatataaataaaataatgattccttacaccgtacccatattaaggagattccaccttacccataaacaatataaatccagtaatatcatgtctgatgatgaacacaaatggtgtattaaattccagtttttcaggagatgatctcgccgtagctaccataatagtagatgcctctgctacagttccttgttcgtcgacatctatctttgcattctgaaacattttataaatatataatgggtccctagtcatatgtttaaacgacgcattatctggattaaacatactaggagccatcatttcggctatcgacttaatatccctcttattttcgatagaaaatttagggagtttaagattgtacactttattccctaattgagacgaccaatagtctaattttgcagccgtgatagaatctgtgaaatgggtcatattatcacctattgccaggtacatactaatattagcatccttatacggaaggcgtaccatgtcatattctttgtcatcgattgtgattgtatttccttgcaatttagtaactacgttcatcatgggaaccgttttcgtaccgtacttattagtaaaactagcattgcgtgttttagtgatatcaaacggatattgccatatacctttaaaatatatagtattaatgattgcccatagagtattattgtcgagcatattagaatctactacattagacataccggatctacgttctactatagaattaattttattaaccgcatctcgtctaaagtttaatctatataggccgaatctatgatattgttgataatacgacggtttaatgcacacagtattatctacgaaactttgataagttagatcagtgtacgtatatttagatgttttcagcttagctaatcctgatattaattctgtaaatgctggacccagatctctttttctcaaatccatagtcttcaataattctattctagtattacctgatgcaggcaatagcgacataaacatagaaaacgaataaccaaacggtgagaagacaatattatcatcttgaatatttttatacgctactataccggcattggtaaatccttgtagacgataggcggacgctgaacacgctaacgatagtatcaataacgcaatcatgattttatggtattaataattaaccttatttttatgttcggtataaaaaaattattgatgtctacacatccttttgtaattgacatctatatatccttttgtataatcaactctaatcactttaacttttacagttttccctaccagtttatccctatattcaacatatctatccatatgcatcttaacactctctgccaagatagcttcagagtgaggatagtcaaaaagataaatatatagagcataatcattctcgtatactctgccctttattacatcacccgcattgggcaacgaataacaaaatgcaagcatcttgttaacgggctcgtaaattgggataaaaattatgtttttattgtcttatatctattttattcaagagaatattcaggaatttctttttccggttgtatctcgtcgcagtatatatcatttgtacattgtttcatattttttaatagtttacaccttttagtaggactagtatcgtacaattcatagctgtattttgaattccaatcacgcataaaaatatcttccaattgttgacgaagacctaatccatcatccggtgtaatattaatagatgctccacatgtatccgtaaagtaatttcctgtccaatttgaggtacctatataggccgttttatcggttaccatatatttggcatggtttaccctagaatacggaatgggaggatcagcatctggtacaataaatagctttacttctatatttatgtttttagattttagcatagcgatagatcttaaaaagtttctcatgataaacgaagatcgttgccagcaactaatcaatagcttaacggatacttgtctgtctatagcggatcttcttaattcatcttctatataaggccaaaacaaaattttacccgccttcgaataaataatagggataaagttcataacagatacataaacgaatttactcgcatttctaatacatgacaataaagcggttaaatcattggttctttccatagtacatagttgttgcggtgcagaagcaataaatacagagtgtggaacgccgcttacgttaatactaagaggatgatctgtattataatacgacggataaaagtttttccaattatatggtagattgttaactccaagataccagtatacctcaaaaatttgagtgagatccgctgccaagttcctattattgaagatcgcaatacccaattccttgacctgagttagtgatctccaatccatgttagcgcttcctaaataaatatgtgtattatcagatatccaaaattttgtatgaagaactcctcctaggatatttgtaatatctatgtatcgtacttcaactccggccatttgtagtctttcaacatcctttaatggtttgttagatttattaacggctactctaactcgtactcctcttttgggtaattgtacaatctcgtttaatattatcgtgccgaaattcgtacccacttcatccgataaactccaataaaaagatgatatatctagtgtttttgtggtattggatagaatttccctccacatgttaaatgtagacaaatatactttatcaaattgcatacctataggaatagtttctgtaatcactgcgattgtattatccggattcattttatttgttaaaagaataatcctatatcacttcactctattaaaaatccaagtttctatttctttcatgactgattttttaacttcatccgtttccttatgaagatgatgtttggcaccttcataaatttttatttctctattacaatttgcatgttgcatgaaataatatgcacctaaaacatcgctaatcttattgtttgttccctggagtatgagagtcggggggtgttaatcttggaaattatttttctaaccttgttggtagccttcaagacctgactagcaaatccagccttaattttttcatgattgactaatgggtcgtattggtatttataaactttatccatatctctagatactgattctggacatagctttccgactggcgcatttggtgtgatggttcccataagtttggcagctagcagattcagtcttgaaacagcatctgcattaactagaggagacattagaatcattgctgtaaacaagtttggattatcgtaagaggctagctcccatggaatgacccaataagtagatttaatagttaccacgtgctgtaccaaagtcatcaatcatcattttttcaccattacttcttccatgtccaatatgatcatgtgagaatactaaaattcctaacgatgatatgttttcagctagttcgtcataacgtccagaatgtttaccagctccatgacttatgaatactaatgccttaggatatgtaataggtttccaatatttacaatatatgtaatcattgtccagattgaacatacagtttgcactcatgattcacgttatataactatcaatattaacagttcgtttgatgatcatattatttttatgttttattgataattgtaaaaacatacaattaaatcaatatagaggaaggagacggctactgtcttttgtaagatagtcatggcgactaaattagattatgaggatgctgttttttactttgtggatgatgataaaatatgtagtcgcgactccatcatcgatctaatagatgaatatattacgtggagaaatcatgttatagtgtttaacaaagatattaccagttgtggaagactgtacaaggaattgatgaagttcgatgatgtcgctatacggtactatggtattgataaaattaatgagattgtcgaagctatgagcgaaggagaccactacatcaattttacaaaagtccatgatcaggaaagtttattcgctaccataggaatatgtgctaaaatcactgaacattggggatacaaaaagatttcagaatctagattccaatcattgggaaacattacagatttgatgaccgacgataatataaacatcttgatactttttctagaaaaaaaattgaattgatgatataggggtcttcataacgcataattattacgttagcattctatatccgtgttaaaaaaaattatcctatcatgtatttgagagttttatatgtagcaaacatgatagctgtgatgccaataagctttagatattcacgcgtgctagtgttagggatggtattatctggtggtgaaatgtccgttatataatctacaaaacaatcatcgcatatagtatgcgatagtagagtaaacatttttatagtttttactggattcatacatcgtctacccaattcggttataaatgaaattgtcgccaatcttacacccaaccccttgttatccattagcatagtattaacttcgttatttatgtcataaactgtaaatgattttgtagatgccatatcatacatgatattcatgtccctattataatcattactaactttatcacaatatatgttgataatatctatatatgatctagtctttgtgggcaactgtctatacaagtcgtctaaacgttgtttactcatatagtatcgaacagccatcattacatggtcccgttccgttgatagataatcgagtatgttagtggacttgtcaaatctatataccatattttctggaagtggatatacatagtcgtgatcaacattattgctagcctcatcttctatatcctgtactataccattatctatatcatctacataatctatgatattattacacataaacatcgacaacatactattgtttattatctaagtcctgttgatccaaacccttgatctcctctatttgtactatctagagattgtacttcttccagttctggataatatatacgttgatagattagctgagctattctatctccagtatttacattaaacgtacattttccattattaataagaatgactcctatgtttcccctataatcttcgtctattacaccacctcctatatcaatgccttttagtgacagaccagacctaggagctattctaccatagcagaacttaggcatggacatactaatatctgtcttaattaactgtctttctcctggagggatagtataatcgtaagcgctatacaaatcatatccggcagcacccggcgattgcctagtaggagatttagctctgttagtttccttaacaaatctaactggtgagttaatattcatgttgaacataaaactaatattttatttcaaaattatttaccatcccatatattccatgaataagtgtgatgattgtacacttctatagtatctatatacgatccacgataaaatcctcctatcaatagcagtttattatccactatgatcaattctggattatccctcggataaataggatcatctatcagagtccatgtattgctggattcacaataaaattccgcatttctaccaaccaagaataaccttctaccgaacactaacgcgcatgatttataatgaggataataagtggatggtccaaactgccactgatcatgattgggtagcaaatattctgtagttgtatcagtttcagaatgtcctcccattacgtatataacattgtttatggatgccactgctggattacatctaggtttcagaagactcggcatattaacccaagcagcatccccgtggaaccaacgctcaacagatgtgggatttggtagacctcctactacgtataatttattgttagcgggtatcccgctagcatacagtctggggctattcatcggaggaattggaatccaattgtttgatatataatttacagctatagcattgttatgtatttcattgttcatccatccaccgatgagatatactacttctccaacatgagtacttgtacacatatggaatatatctataatttgatccatgttcataggatactctatgaatggatacttgtatgatttgcgtggttgtttatcacaatgaaatattttggtacagtctagtatccattttacattatttatacctctgggagaaagataatttgacctgattacatttttgataaggagtagcagatttcctaatttatttcttcgcctcatataccacttaatgacaaaatcaactacataatcctcatctggaacatttagttcatcgctttctagaataagtttcatagatagataatcaaaattgtctatgatgtcatcttccagttccaaaaagtgtttggcaataaagtttttagtatgacataagagattggatagtccgtattctatacccatcatgtaacactcgacacaatattcctttctaaaatctcgtaagataaagtttatacaagtgtagatgataaattctacagaggttaatatagaagcacgtaataaattgacgacgttatgactatctatatatacctttccagtatatgagtaaataactatagaagttaaactgtgaatgtcaaggtctagacaaacccttgtaactggatctttatttttcgtgtatttttgacgtaaatgtgtgcgaaagtaaggagataactttttcaatatcgtagaattgactattatattgcctcctatggcatcaataattgttttgaatttcttagtcatagacaatgctaatatattcttacagtacacagtattgacaaatatcggcatttatgtttctttaaaagtcaacatctagagaaaaatgattatctttttgagacataactcccattttttggtattcacccacacgtttttcgaaaaaattagtttttccttccaatgatatattttccatgaaatcaaacggattggtaacattataaatttttttaaatcccaattcagaaatcaatctatccgcgacgaattctatatatgttttcatcatttcacaattcattcctataagtttaactggaagagccgcagtaagaaattcttgttcaatggatactgcatctgttataatagatctaacggtttcttcactcggtggatgcaataaatgtttaaacatcaaacatgcgaaatcgcagtgcagaccctcgtctctactaattagttcgttggaaaacgtgagtccgggcattaggccacgctttttaagccaaaatatggaagcgaatgatccagaaaagaaaattccttctactgcagcaaaggcaataagtctctctccataaccggcgctgtcatgtatccacttttgagcccaatcggccttcttttttacacaaggcatcgtttctatggcattaaagagatagtttttttcattactatctttaacataagtatcgatcaaaagactatacatttccgaatgaatgttttcaatggccatctgaaatccgtagaaacatctagcctcggtaatctgtacttctgtacaaaatcgttccgccaaattttcattcactattccgtcactggctgcaaaaaacgccaatacatgttttataaaatatttttcgtctggtgttagtttattccaatcattgatatctttagatatatctacttcttccactgtccaaaatgatgcctctgcctttttatacatgttccagatgtcatgatattggattgggaaaataacaaatctatttggatttggtgcaaggatgggttccataactaaattaacaataacaataaattttttttcagttatctatatgcctgtacttggattttttgtacatcgatatcgccgcaatcactacaataattacaagtattattgatagcattgttattagtactatcataattaaattatctacattcatgggtgctgaataatcgttattatcatcattatcattttgtaattgtgacatcatactagataaatcgtttgcgagattgttgtgggaagcgggcatggaggatgcattatcattattatttaacgccttccatttggattcacaaatgttacgcacattcaacattttatggaaactataattttgtgaaaacaaataacaagaaaactcgtcatcgttcaaatttttaacgatagtaaaccgattaaacgtcgagctaatttctaacgctagcgactctgttggatatgggtttccagatatatatcttttcagttcccctacgtatctataatcatctgtaggaaatggaagatatttccatttatctactgttcctaatatcatatgtggtggtgtagtagaaccattaagcgcgaaagatgttatttcgcatcgtattttaacttcgcaataatttctggttagataacgcactctaccagtcaagtcaatgatattagcctttacagatatattcatagtagtcgtaacgatgactccatcttttagatgcgatactcctttgtatgtaccagaatcttcgtacctcaaactcgatatatttaaacaagttaatgagatattaacgcgttttatgaatgatgatatataaccagaagttttatcctcggtggctagcgctataaccttatcattataataccaactagtgtgattaatatgtgacacgtcagtgtgggtacaaatatgtacattatcgtctacgtcgtattcgatacatccgcatacagccaacaaatataaaatgacaaatactctaacgccgttcgtacccatcttgatgcggtttaataaatgttttgatttcaatttattgtaaaaaaagattcggttttatactgttcgatattctcattgcttatattttcatctatcatctccacacagtcaaatccgtggttagcatgcacctcatcaaccggtaaaagactatcggactcttctatcattataactctagaatatttaatttggtcattattaatcaagtcaattatcttatttttaacaaacgtgagtattttactcattttttataaaaacttttagaaatatacagactctatcgtgtgtctatatcttctttttatatccaatgtatttatgtctgatttttcttcatttatcatatataatggtccaaattctacacgtgcttcggattcatccagatcattaaggttcttataattgtaacatccttctcttccctcttctacatcttccttcttattcttattcttagcgtcacagaatctaccacagcaggatcccatgacgagcgtcatattaaactaatccattttcaattataatatatgattagtaatgaccattaaaataaaaaatattcttcataaccggcaagaaagtgaaaagttcacattgaaactatgtcagtagtatacatcatgaaatgatgatatatatatactctattttggtggaggattatatgatataattcgtggataatcatttttaagacacatttctttattcgtaaatcttttcacgttaaatgagtgtccatattttgcaatttcttcatatgatggcggtgtacgtggacgaggctgctcctgttcttgttgtggtcgccgactgtcgtgtctgcgtttagatccctccattatcgcgattgcgtagatggagtactattttataccttgtaattaaatttttttattaattaaacgtataaaaacgttccgtatctgtatttaagagccagatttcgtctaatagaacaaatagctacagtaaaaataactagaataattgctacacccactagaaaccacggatcgtaatacggcaatcggttttcgataataggtggaacgtatattttatttaaggacttaacaattgtctgtaaaccacaatttgcttccgcggatcctgtattaactatctgtaaaagcatatgttgaccgggcggagccgaacattctccgatatctaatttctgtatatctataatattattaacctccgcatacgcattacagttcttttctagcttggataccgcactaggtacatcgtctagatctattcctatttcctcagcgatagctcttctatccttttccggaagcaatgaaatcacttcaataaatgattcaaccatgagtgtgaaactaagtcgagaattactcatgcatttgttagttattcggagcgcgcaatttttaaactgtcctataacctctcctatatgaatagcacaagtgacattagtagggatagaatgttgagctaatttttgtaaataactatctataaaaagattatacaaagttttaaactctttagtttccgccatttatccagtctgagaaaatgtctctcataataaatttttccaagaaactaattgggtgaagaatggaaacctttaatctatatttatcacagtctgttttggtacacatgatgaattcttccaatgccgtactaaattcgatatctttttcgatttctggatatgtttttaataaagtatgaacaaagaaatggaaatcgtaataccagttatgtttaactttgaaattgttttttattttcttgttaatgattccagccacttgggaaaagtcaaagtcgtttaatgccgatttaatacgttcattaaaaacaaactttttatcctttagatgaattattattggttcattggaatcaaaaagtaagatattatcgggtttaagatctgcgtgtaaaaagttgtcgcaacagggtagttcgtagattttaatgtataacagagccatctgtaaaaagataaactttatgtattgtaccaaagatttaaatcctaatttgatagctaactcggtatctactttatctgccgaatacagtgctaggggaaaaattataatgtttcctctttcatattcgtagttagttctcttttcatgttcgaaaaagtgaaacatgcggttaaaatagtttataacattaatattactgttaataactgccggataaaagtgggatagtaatttcacgaatttgatactgtcctttctctcgttaaacgcctttaaaaaaactttagaagaatatctcaatgagagttcctgaccatccatagtttgtatcaataatagcaacatatgaagaacacgtttatacagagtatgtaaaaatgttaatttatagtttaatcccatggcccacgcacacacgattaattttttttcatctccctttagattgttgtatagaaatttgggtactgtgaactccgccgtagtttccatgggactatataattttgtggcctcgaatacaaattttactacatagttatctatcttaaagactataccatatcctcctgtagatatgtgataaaaatcgtcgtttataggataaaatcgtttatccttttgttggaaaaaggatgaattaatgtaatcattctcttctatctttagtagtgtttccttattaaaattcttaaaataatttaacaatctaactgacggagcccaattttggtgtaaatctaattgggacattatattgttaaaatacaaacagtctcctaatataacagtatctgataatctatggggagacatccattgatattcaggggatgaatcattggcaacacccatttattgtacaaaaagccccaatttacaaacgaaagtccaggtttgatagagacaaacaattaactattttgtctctgtttttaacacctccacagtttttaatttctttagtaatgaaattattcacaatatcagtatcttctttatctaccagagattttactaacttgataaccttggctgtctcattcaatagggtagtaatatttgtatgtgtgatattgatatctttttgaattgtttcttttagaagtgattctttgatggtgccagcatacgaattacaataatgcagaaactcggttaacatgcaggaattatagtaagccaattccaattgttgcctgtgttgtattagagtgtcaatatgagcaatggtgtccttgcgtttctctgatagaatgcgagcagcgattttggcgttatcatttgacgatatttctggaatgacgaatcctgtttctactaactttttggtaggacaaagtgaaacaatcaagaagatagcttctcctcctatttgtggaagaaattgaactcctctagatgatctactgacgatagtatctccttgacagatattggaccgaattacagaagtacctggaatgtaaagccctgaaaccccctcattttttaagcagattgttgccgtaaatcctgcactatgcccaagatagagagctcctttggtgaatccatctctatgtttcagtttaaccaagaaacagtcagctggtctaaaatttccatctctatctaatacagcatctaacttgatgtcaggaactatgaccggtttaatgttatatgtaacattgagtaaatccttaagttcataatcatcactgtcatcagttatgtacgatccaaacaatgtttctaccggcatagtggatacgaagatgctatccatcagaatgtttccctgattagtattttctatatagctattcttctttaaacgattttccaaatcagtaactatgttcatttttttaggagtaggacgcctagccagtatggaagaggattttctagatcctctcttcaacatctttgatctcgatggaatgcaaaaccccatagtgaaacaaccaacgataaaaataatattgtttttcactttttataattttaccatctgactcatggattcattaatatctttataagagctactaacgtataattctttataactgaactgagatatatacaccggatctatggtttccataattgagtaaatgaatgctcggcaataactaatggcaaatgtatagaacaacgaaattatactagagttgttaaagttaatattttctatgagctgttccaataaattatttgttgtgactgcgttcaagtcataaatcatcttgatactatccagtaaaccgtttttaagttctggaatattatcatcccattgtaaagcccctaattcgactatcgaatatcctgctctgatagcagtttcaatatcgacggacgtcaatactgtaataaaggtggtagtattgtcatcatcgtgataaactacgggaatatggtcgttagtaggtacggtaactttacacaacgcgatatataactttccttttgtaccatttttaacgtagttgggacgtcctgcagggtattgttttgaagaaatgatatcgagaacagatttgatacgatatttgttggattcctgattattcactataatataatctagacagatagatgattcgataaatagagaaggtatatcgttggtaggataatacatccccattccagtattctcggatactctattgatgacactagttaagaacatgtcttctattctagaaaacgaaaacatcctacatggactcattaaaacttctaacgctcctgattgtgtctcgaatgcctcgtacaaggatttcaaggatgccatagattctttgaccaacgatttagaattgcgtttagcatctgatttttttattaaatcgaatggtcggctctctggtttgctaccccaatgataacaatagtcttgtaaagataaaccgcaagaaaatttatacgcatccatccaaataaccctagcaccatcggatgatattaatgtattattatagattttccatccacaattattgggccagtatactgttagcaacggtatatcgaatagattactcatgtaacctactagaatgatagttcgtgtactagtcataatatctttaatccaatctaaaaaatttaaaattagattttttacactgttaaagttaacaaaagtattacccgggtacgtggatatcatatatggcattggtccattatcagtaatagctccataaactgatacggcgatggtttttatatgtgtttgatctaacgaggaagaaattcgcgcccacaattcatctctagatatgtatttaatatcaaacggtaacacatcaatttcgggacgcgtatatgtttctaaatttttaatccaaatataatgatgacctatatgccctattatcatactgtcaactatagtacacctagggaacttacgatacatctgtttcctataatcgttaaattttacaaatctataacatgctaaaccttttgacgacagccattcattaatttctgatatggaatctgtattctcgataccgtatcgttctaaagccagtgctatatctccctgttcgtgggaacgctttcgtataatatcgatcaacggataatctgaagtttttggagaataatatgactcatgatctatttcgtccataaacaatctagacataggaattggaggcgatgatcttaattttgtgcaatgagtcgtcaatcctataacttctaatcttgtaatattcatcatcgacataatactatctatgttatcatcgtatattagtataccatgaccttcttcatttcgtgccaaaatgatatacagtcttaaatagttacgcaatatctcaatagtttcataattgttagctgttttcatcaaggtttgtatcctgtttaacatgatggcgttctataacgtctctattttctatttttaattttttaaatttttaacgatttactgtggctagatacccaatctctctcaaatatttttttagcctcgcttacaagctgtttatctatactattaaaactgacgaatccgtgattttggtaatgggttccgtcgaaatttgccgaagtgatatgaacatattcgtcgtcgactatcaacaattttgtattattctgaatagtgaaaaccttcacagatagatcattttgaacacacaacgcatctagacttttggcggttgccatagaatatacgtcgttcttatcccaattaccaactagaagtctgatcttaactcctctattaatggctgcttctataatggagttgtaaatgtcgggccaatagtagctattaccgtcgacacgtgtagtgggaactatggccaaatgttcaatatctatactagtcttagctgacctgagtttatcaataactacatcggtatctagatctctagaatatcccaataggtgttccggagaatcagtaaagaacactccacctataggattcttaatatgatacgcagtgctaactggcaaacaacaagccgcagagcataaattcaaccatgaattttttgcgctattaaaggctttaaaagtatcaaatcttctacgaagatctgtggccagcgggggataatcagaatatacacctaacgttttaatcgtatgtatagatcctccagtaaatgacgcgtttcctacataacatctttcatcatctgacacccaaaaacaaccgagtagtagtcccacattattttttttatctatattaacggttataaaatttatatccgggcagtgactttgtagctctcccagatttcttttccctcgttcatctagcaaaactattattttaatccctttttcagatgcctcttttagtttatcaaaaataagcgctcccctagtcgtactcagaggattacaacaaaaagatgctatgtatatatatttcttagctagagtgataatttcgttaaaacattcaaatgttgttaaatgatcggatctaaaatccatattttctggtagtgtttctaccagcctacattttgctcccgcaggtaccgatgcaaatggccacatttagttaacataaaaacttatacatcctgttctatcaacgattctagaatatcatcggctatatcgctaaaattttcatcaaagtcgacatcacaacctaactcagtcaatatattaagaagttccatgatgtcatcttcgtctatttctatatccgtatccattgtagattgttgaccgattatcgagtttaaatcattactaatactcaatccttcagaatacaatctgtgtttcattgtaaatttataggcggtgtatttaagttggtagattttcaattatgtattaatatagcaacagtagttcttgctcctccttgattctagcatcctcttcattattttcttctacgtacataaacatgtccaatacgttagacaacacaccgacgatggcggccgcaggatcctgcgaagcttacagacacgaatatgactaaaccgatgaccatttaaaaacccctctctagctttcacttaaactgtatcgatcattcttttagcacatgtataatataaaaacattattctatttcgaatttaggcttccaaaaatttttcatccgtaaaccgataataatatatatagacttgttaatagtcggaataaatagattaatgcttaaactatcatcatctccacgattagagatacaatatttacattctttttgctgtttcgaaactttatcaatacacgttaatacaaacccaggaaggagatattgaaactgaggctgttgaaaatgaaacggtgaatacaataattcagataatgtaaaatcatgattccgtattctgatgatattagaactgctaatggatgtcgatggtatgtatctaggagtatctattttaacaaagcatcgatttgctaatatacaattatccttttgattaattgttattttattcatattcttaaaaggtttcatatttatcaattcttctacattaaaaatttccatttttaatttatgtagccccgcaatactcctcattacgtttcattttttgtctataatatccattttgttcatctcggtacatagattatccaattgagaagcgcatttagtagttttgtacattttaagtttattgacgaatcgtcgaaaactagttatagttaacattttattatttgataccctgatattaatacccctgccgttactattatttataactgatgtaatccacgtaacattggaattaactatcgatagtaatgcatcgacgcttccaaaattgtctattataaactcaccgataatttttttattgcatgttttcatattcattaggattatcaaatctttaatcttattacgattgtatgcgttgatattacaagacgtcattctaaaagacggaggatctccatcaaatgccagacaatcacgtacaaagtacatggaaataggttttgttctattgcgcatcatagatttatatagaacacccgtagaaatactaatttgttttactctataaaatactaatgcatctatttcatcgttttgtataacgtctttccaagtgtcaaattccaaatttttttcattgatagtaccaaattcttctatctctttaactacttgcatagataggtaattacagtgatgcctacatgccgttttttgaaactgaatagatgcgtctagaagcgatgctacgctagtcacaatcaccactttcatatttagaatatatatatgtaaaaatatagtagaatttcattttgtttttttctatgctataaatgaattctcattttgcatctgctcatactccgttttatattaataccaaagaaggaagatatctggttctaaaagccgttaaagtatgcgatgttagaactgtagaatgcgaaggaagtaaagcttcctgcgtactcaaagtagataaaccctcatcgcccgcgtgtgagagaagaccttcgtccccgtccagatgcgagagaatgaataaccctggaaaacaagttccgtttatgaggacggacatgctacaaaatatgttcgcggctaatcgcgataatgtagcttctagacttttgtcctaaaatactattatatccttttcgatattaataaatccgtgtcgtccaggttttttatctctttcagtatgtgaatagataggtattttatctctattcatcatcgaatttaagagatccgataaacattgtttgtattctccagatgtcagcatctgatacaacaatatatgtgcacataaacctctggcacttatttcatgtaccttccccttatcactaaggagaatagtatttgagaaatatgtatacatgatattatcatgaattagatatacagaatttgtaacactctcgaaatcacacgatgtgtcggcgttaagatctaatatatcactcgataacacattttcatctagatacactagacattttttaaagctaaaatagtctttagtagtaacagtaactatgcgattattttcatcgatgatacatttcatcggcatattattacgcttaccatcaaagactataccatgtgtatatctaacgtattctagcatggttgccatacgcgcattaaacttttcaggatctttggatagatcttccaatctatctatttgagaaaacatttttatcatgttcaatagttgaaacgtcggatccactatatagatattatctataaagattttaggaactacgttcatggtatcctggcgaatattaaaactatcaatgatatgattatcgttttcatcttttatcaccatatagtttctaagatatgggattttacttaatataatattatttcccgtgataaattttattagaaaggccaaatctataagaaaagtcctagaattagtctgaagaatatctatatcgccgtatagtatatttggattaattagatatagagaatatgatccgtaacatatacaacttttattatggcgtctaagatattcttccatcaacttattaacatttttgactagggaagatacattatgacgtcccattacttttgccttgtctattactgcgacgttcatagaatttagcatatctcttgccaattcttccattgatgttacattataagaaattttagatgaaattacatttggagctttaatagtaagaactcctaatatgtccgtgtatgtggtcactaatacagattgtagttctataatcgtaaataatttacctatattatatgtttgagtctgtttagaaaagtagctaagtatacgatcttttatttctgatgcagatgtattaacatcggaaaaaaatctttttttattcttttttactaaagatacaaatatgtctttgttaaaaacagttattttctgaatatttctagcttgtaattttaacatatgatattcgttcacactaggtactctgcctaaataggtttctataatctttaatgtaatattaggaaaagtattctgatcaggattcctattcattttgaggatttaaaactctgattattgtctaatatggtctctacgcaaactttttcacagagcgatagagtttttgataactcgtttttcttaagaaatataaaactactgtctccagagctcgctctatcttttattttatctaattcgatacaaactcctgatactggttcagaaagtaattcattaattttcagtcctttatagaagatatttaatatagataatacaaaatcttcagtttttgatatcgatctgattgatcctagaactagatatattaataacgtgctcattaggcagtttatggcagcttgataattagatatagtatattccagttcatatttattagataccgcattgcccagattttgatattctatgaattcctctgaaaataaatccaaaataactagacattctattttttgtggattagtgtactctcttccctctatcatgttcactactggtgtccacgatgataaatatctagagggaatataatatagtccataggatgccaatctagcaatgtcgaataactgtaattttattcttcgctcttcattatgaattgattcttgaggtataaacctaacacaaattatattattagacttttcgtatgtaatgtctttcatgttataagtttttaatcctggaatagaatctattttaatgaggcttttaaacgcagagttctccaacgagtcaaagcataatactctgttgtttttcttatatacgatgttacgattttcttctttgaatggaataggtttttgaattagtttataattacaacataatagataaggaagtgtgcaaatagtacgcggaaaaaacataatagctcccctgttttcatccatggttttaagtaaatgatcactggcttctttagtcaatggatattcgaacattaaccgtttcatcatcattggacagaatccatatttcttaatgtaaagagtgatcaaatcattgtgtttattgtaccatcttgttgtaaatgtgtattcggttatcggatctgctcctttttctattaaagtatcgatgtcaatctcgtctaagaattcaactatatcgacatatttcatttgtatacacataaccattactaacgtagaatgtataggaagagatgtaacgggaacagggtttgttgattcgcaaactattctaatacataattcttctgttaatacgtcttgcacgtaatctattatagatgccaagatatctatataattattttgtaagatgatgttaactatgtgatctatataagtagtgtaataattcatgtattttgatatatgttccaactctgtctttgtgatgtctagtttcgtaatatctatagcatcctcaaaaaatatattcgcatatattcccaagtcttcagttctatcttctaaaaaatcttcaacgtatggaatataataatctattttacctcttctgatatcattaatgatatagtttttgacactatcttctgtcaattgattcttattcactatatctaagaaacggatagcgtccctaggacgaactactgccattaatatctctattatagcttctggacataattcatctattataccagaattaatgggaactattccgtatctatctaacatagttttaagaaagtcagaatctaagacttgatgttcatatattggttcatacatgaaatgatctctattgatgatagtgactatttcattctctgaaaattggtaactcattctatatatgctttccttgttgatgaaggatagaatatactcaatagaatttgtaccaacaaactgttctcttatgaatcgtatatcatcatctgaaataatcatgtaaggcatacatttaacaattagagacttgtctcctgttatcaatatactattcttgtgataatttatgtgtgaggcaaatttgtccacgttctttaattttgttatagtagatatcaaatccaatggagctacagttcttggcttaaacagatatagtttttctggaacaaattctacaacattattataaaggactttgggtagataagtgggatgaaatcctattttaattaatgcgatagccttgtcctcgtgcagatatccaaacgcttttgtgatagtatggcattcattgtctagaaacgctctacgaatatctgtgacagatatcatctttagagaatatactagtcgcgttaatagtactacaatttgtattttttaatctatctcaataaaaaaattaatatgtatgattcaatgtataactaaactactaactgttattgataactagaatcagaatctaatgatgacgtaaccaagaagtttatctactgccaatttagctgcattatttttagcatctcgtttagattttccatcggccttatcgaatactcttccgtcgatgtctacacaggcataaaatgtaggagagttactaggcccaactgattcaatacgaaaagaccaatctctcctagtaatttggcagtactcattaataacggtgacagggttagcatctttccaatcaataatttttttagccggaataacatcatcaaaagacttatgatcctctctcattgatttttcgcgggatacatcatctattatgacgtcagccatagcatcagcatccggcttatccgcctccgttgtcataaaccaacgaggaggaatatcgtcggagctgtacaccatagcactacgttgaagatcgtacagagctttattaacttctcgcttctccatattaagttgtctagttagttgtgcagcagtagctccttcgattccaatgtttttaatagccgcacacacaatctctgcgtcagaacgctcgtcaatatagatcttagacatttttagagagaactaacgcaaccagcaataaaactgaacctactttatcatttttttattcatcatcctctggtggttcgtcgttcctatcaaatgtagctctgattaacccgtcatctataggtgatgctggttctggagattctggaggagatggattattatctggaagaatctctgttatttccttgttttcatgtatcgattgcgttgtaacattaagattgcgaaatgctctaaatttgggaggcttaaagtgttgtttgcaatctctacacgcgtgtctaactagtggaggttcgtcagctgctctagtttgaatcatcatcggcgtagtattcctacttttacagttaggacacggtgtattgtatttctcgtcgagaacgttaaaataatcgttgtaactcacatcctttattttatctatattgtattctactcctttcttaatgcattttataccgaataagagatagcgaaggaattctttttcggtgccgctagtacccttaatcatatcacatagtgttttatattccaaatttgtggcaatagacggtttatttctatacgatagtttgtttctggaatcctttgagtattctataccaatattattctttgattcgaatttagtttcttcgatattagattttgtattacctatattcttgatgtagtactttgatgatttttccatggcccattctattaagtcttccaagttggcatcatccacatattgtgatagtaattctcggatatcagtagcggctaccgccattgatgtttgttcattggatgagtaactactaatgtatacattttccatttataacacttatgtattaactttgttcatttatattttttcattattatgttgatattaacaaaagtgaatatatatatgttaataattgtattgtggttatacggctacaattttataatgagtgaaagtcagtgtccgatgatcaatgacgatagctttactctgaaaagaaagtatcaaatcgatagtgcggagtcaacaataaaaatggataagaagaggataaagtttcagaatagagccaaaatggtaaaagaaataaatcagacaataagagcagcacaaactcattacgagacattgaaactaggatacataaaatttaagagaatgattatgactactactctagaagatatagcaccatctattccaaataatcagaaaacttataaactattctcggacatttcagccatcggcaaagcatcacagaatccgagtaagatggtatatgctctgctgctttacatgtttcccaatttgtttggagatgatcatagattcattcgttatagaatgcatccaatgagtaaaatcaaacacaagatcttctctcctttcaaacttaatcttattagaatattagtggaagaaagattctataataatgaatgcagatctaataaatggagaataattggaacacaagttgataaaatgttgatagctgaatctgataaatatacaatagatgcaaggtataacctaaaacccatgtatagaatcaagggagaatctgaagaagataccctctttatcaaacagatggtagaacaatgtgtgacatcccaggaattggtggaaaaagtgttgaagatactgtttagagatttgttcaagagtggagaatacaaagcgtacagatacgatgatgatgtagaaaatggatttattggattggatacactaaaattaaacattgttcatgatatagttgaaccatgtatgcctgttcgtaggccagtggctaagatactgtgtaaagaaatggtaaataaatactttgagaatccgctacatattattggtaaaaatcttcaagagtgcattgactttgttagtgaataggcatttcatctttctccaatactaattcaaattgttaaattaataatggatagtataaatagttattagttataagatagtaaaaataattattagaataagagtgtagtatcatagataactctcttctataaaaatggattttattcgtagaaagtatcttatatacacagtagaaaataatatagattttttaaaggatgatacattaagtaaagtaaacaattttaccctcaatcatgtactagctctcaagtatctagttagcaattttcctcaacacgttattactaaggatgtattagctaataccaatttttttgttttcatacatatggtacgatgttgtaaagtgtacgaagcggttttacgacacgcatttgatgcacccacgttgtacgttaaagcattgactaagaattatttatcgtttagtaacgcaatacaatcgtacaaggaaaccgtgcataaactaacacaagatgaaaaatttttagaggttgccgaatacatggacgaattaggagaacttataggcgtaaattatgacttagttcttaatccattatttcacggaggggaacccatcaaagatatggaaatcatttttttaaaactgtttaagaaaacagacttcaaagttgttaaaaaattaagtgttataagattacttatttgggcatacctaagcaagaaagatacaggcatagagtttgcggataatgatagacaaaatatatacactctatttcaacaaactggtagaatcgtccatagcaatctaacagaaacgtttagagattatatctttcccggagataagactagctattgggtgtggttaaacgaaagtatagctaatgatgcggatatcgttcttaatagacacgccattaccatgtatgataaaattcttagttatatatactctgagataaaacaaggacgcgttaataaaaacatgcttaagttagtttatatctttgagcctgaaaaagatatcagagaacttctgctagaaatcatatatgatattcctggagatatcctatctattattgatgcaaaaaacgacgattggaaaaaatattttattagtttttataaagctaattttattaacggtaatacatttattagtgatagaacgtttaacgaggacttattcagagttgttgttcaaatagatcccgaatatttcgataatgaacgaattatgtctttattctctacgagtgctgcggacattaaacgatttgatgagttagatattaataacagttatatatctaatataatttatgaggtgaacgatatcacattagatacaatggatgatatgaagaagtgtcaaatctttaacgaggatacgtcgtattatgttaaggaatacaatacatacctgtttttgcacgagtcggatcccatggtcatagagaacggaatactaaagaaactgtcatctataaaatccaagagtagacggctgaacttgtttagcaaaaacattttaaaatattatttagacggacaattggctcgtctaggtcttgtgttagatgattataaaggagacttgttagttaaaatgataaaccatcttaagtctgtggaggatgtatccgcattcgttcgattttctacagataaaaaccctagtattcttccatcgctaatcaaaactattttagctagttataatatttccatcatcgtcttatttcaaaggtttttgagagataatctatatcatgtagaagaattcttggataaaagcatccatctaaccaagacggataagaaatatatacttcaattgataagacacggtagatcatagaacagaccaaatatattattaataatttgtatatacatagatataattatcacacatttttgataaatgggaactgctgcaacaattcagactcccaccaaattaatgaataaagaaaatgcagaaatgattttggaaaaaattgttgatcatatagttatgtatattagtgacgaatcaagtgattcagaaaataatcctgaatatattgattttcgtaacagatacgaagactatagatctctcattataaaaagtgatcacgagtttgtaaagctatgtaaaaatcatgcggagaaaagttctccagaaacgcaacaaatgattatcaaacacatatacgaacaatatcttattccagtatctgaagtactattaaaacctataatgtccatgggtgacataattacatataacggatgtaaagacaatgaatggatgctagaacaactctctaccctaaactttaacaatctccgcacatggaactcatgtagcataggcaatgtaacgcgtctgttttatacattttttagttatctgatgaaagataaactaaatatataagtataatcccattctaatactttaacctgatgtattagcatcttattagaatattaacctaactaaaagacataacataaaaactcattacatagttgataaaaagcggtaggatataaatattatggctgccaccgttccgcgttttgacgacgtgtacaaaaatgcacaaagaagaattctagatcaagaaacattttttagtagaggtctaagtagaccgttaatgaaaaacacatatctatttgataattacgcgtatggatggataccagaaactgcaatttggagtagtagatacgcaaacctagatgctagtgactattatcccatttcgttgggattacttaaaaagttcgagtttctcatgtctctatataaaggtcctattcccgtatatgaagaaaaagtaaatactgaattcatagccaatggatcgttctctggtagatacgtatcatatcttcgaaagttttctgcccttccaacaaacgagtttattagttttttgttactgacttccattccaatctataatatcttgttctggtttaaaaacacacagtttgatattactaaacacacattattcagatacgtctatacagataatgccaaacacctggcgttggctaggtatatgcatcaaacaggagactataagcctttgtttagtcgtctcaaagagaattatatatttaccggtcccgttccaataagtatcaaagatatagatcaccctaatcttagtagagcaagaagtccatccgattatgagacattagctaatattagtactatattgtactttaccaagtatgatccggtattaatgtttttattgttttacgtacctgggtattcaattactacaaaaattactccagccgtagaatatctaatggataaactgaatctaacaaagagcgacgtacaactgttgtaaattattttatgcttcgtaaaatgtaggttttgaaccaaacattctttcaaagaatgagatgcataaaactttattatccaatagattgactatttcggacgtcaatcgtttaaagtaaacttcgtaaaatattctttgatcactgccgagtttaaaacttctatcgataattgtctcatatgttttaatatttacaagttttttggtccatggtacattagccggacaaatatatgcaaaataatatcgttctccaagttctatagtttctggattatttttattatattcagtaactaaatacatattagggttatctgcggatttataatttgagtgatgcattctactcaacataaataattctagaggagacgatctactatcaaattcggatcgtaaatctgtttctaaagaacggagaatatctatacatacctgattagaattcatccgtccttcagacaacatctcagacagtctggttttgtacatcttaatcatattcttatgaaacttggaaacatctcttctagtttcactagtacctttattaattctctcaggtacagattttgaattcgacgatgctgagtatttcatcgttgtatatttcttcttcgattgcataatcagattcttatataccgcctcaaactctattttaaaattattaaacaatactctattattaatcagtcgttctaactctttcgctatttctatagacttatctacatcttgactgtctatctctgtaaacacggagtcggtatctccatacacgctacgaaaacgaaatctgtaatctataggcaacgatgttttcacaatcggattaatatctctatcgtccatataaaatggattacttaatggattggcaaaccgtaacataccgttagataactctgctccatttagtaccgattctagatacaagatcattctacgtcctatggatgtgcaactcttagccgaagcgtatgagtatagagcactatttctaaatcccatcagaccatatactgagttggctactatcttgtacgtatattgcatggaatcatagatggccttttcagttgaactggtagcctgttttagcatctttttatatctggctctctctgccaaaaatgttcttaatagtctaggaatggttccttctatcgatctatcgaaaattgctatttcagagatgaggttcggtagtctaggttcacaatgaaccgtaatatatctaggaggtggatatttctgaagcaatagctgattatttatttcttcttccaatctattggtactaacaacgacaccgactaatgtttccggagatagatttccaaagatacacacattaggatacagactgttataatcaaagattaatacattattactaaacattttttgttttggagcaaataccttaccgccttcataaggaaacttttgttttgtttctgatctaactaagatagttttagtttccaacaatagctttaacagtggacccttgatgactgtactcgctctatattcgaataccatggattgaggaagcacatatgttgacgcacccgcgtctgtttttgtttctactccataatactcccacaaatactgacacaaacaagcatcatgaatacagtatctagccatatctaaagctatgtttagattataatccttatacatctgagctaaatcaacgtcatcctttccgaaagataatttatatgtatcattaggtaaagtaggacataatagtacgactttaaatccattttcccaaatatctttacgaattactttacatataatatcctcatcaacagtcacataattacctgtggttaaaacctttgcaaatgcagcggctttgcctttcgcgtctgtagtatcgtcaccgatgaacgtcatttctctaactcctctatttaatactttacccatgcaactgaacgcgttcttggatatagaatccaatttgtacgaatccaatttttcaaatttttgaatgaatgaatatagatcgaaaaatatagttccattattgttattaacgtgaaacgtagtattggccatgccgcctactcccttatgactagactgatttctctcataaatacagagatgtacagcttcctttttgtccggagatctaaagataattttctctcctgttaataactctagacgattagtaatatatctcagatcaaagttatgtccgttaaaggtaacgacgtagtcgaacgttagttccaacaattgtttagctattcgtaacaaaactatttcagaacatagaactagttctcgttcgtaatccatttccattagtgactgtatcctcaaacatcctctatcgacggcttcttgtatttcctgttccgttaacatctcttcattaatgagcgtaaacaataatcgtttaccacttaaatcgatataacagtaacttgtatgcgagattgggttaataaatacagaaggaaacttcttatcgaagtgacactctatatctagaaataagtacgatcttgggatatcgaatctaggtatttttttagcgaaacagttacgtggatcgtcacaatgataacatccattgttaatctttgtcaaatattgctcgtccaacgagtaacatccgtctggagatatcccgttagaaatataaaaccaactaatattgagaaattcatccatggtggcattttgtatgctgcgtttctttggctcttctatcaaccacatatctgcgacggagcattttctatctttaatatctagattataacttattgtctcgtcaatgtctatagttctcatctttcccaacggcctcgcattaaatggaggaggagacaatgactgatatatttcgtccgtcactacgtaataaaagtaatgaggaaatcgtataaatacggtctcgccatttcgacatctggatttcagatataaaaatctgttttcaccgtgactttcaaaccaattaatgcaccgaacatccatttatagaatttagaaatatattttcatttaaatgaatcccaaacattggggaagagccgtatggaccattatttttatagtactttcgcaagcgggtttagacggcaacatagaagcgtgtaaacgaaaactatatactatagttagcactcttccatgtcctgcatgtagacggcacgcgactatcgctatagaggacaataatgtcatgtctagcgatgatctgaattatatttattattttttcatcagattatttaacaatttggcatctgatcccaaatacgcgatcgatgtgacaaaggttaaccctttataaacttaacccattataaaacttatgattagtcacaactgaaataaccgcgtgattattttttggtataattctacacggcatggtttctgtgactatgaattcaacccccgttacattagtgaaatctttaacaaacagcaagggttcgtcaaagacataaaactcattgtttacaatcgaaatagaccccctatcacacttaaaataaaaaatatccttatcctttaccaccaaataaaattctgattggtcaatgtgaatgtattcacttaacagttccacaaatttatttattaactccgaggcacatacatcgtcggtattttttatggcaaactttactcttccagcatccgtttctaaaaaaatattaacgagttccatttatatcatccaatattattgaaatgacgttgatggacagatgatacaaataagaaggtacggtacctttgtccaccatctcctccaattcatgctctattttgtcattaactttaatgtatgaaaacagtacgccacatgcttccatgacagtgtgtaacactttggatacaaaatgtttgacattagtataattgtccaagactgtcaatctataatagatagtagctataatatattctatgatggtattgaagaagatgacaaccttggcatattgatcatttaacacagacatggtatcaacagatagcttgaatgaaagagaatcagtaattggaataagcgtcttctcgatagagtgtccgtataccaacatgtctgatattttgatgtattccattaaattatttagttttttctttttattctcgttaaacagcatttctgtcaacggaccccaacatcgttgaccgattaagttttgattgatttttccgtgtaaggcgtatctagtcagatcgtatagcctatccaataatccatcgtctgtgtgtagatcacatcgtacactttttaattctctatagaagagcgacagacatctggagcaattacagacagcaatttctttattctctacagatgtaagatacttgaagacattcctatgatgatgcagaattttggataacacggtattgatggtatctgttaccataattcctttgatggctgatagtgtcagagcacaagatttccaatctttgacaatttttagcaccattatctttgttttgatatctatatcagacagcatggtgcgtctgacaacacagggattaagacggaaagatgaaatgattctctcaacatcttcaatagataccttgctattttttctggcattatctatatgtgcgagaatatcctctagagaatcagtatcctttttgatgatagtggatctcaatgacatgggacgtttaaaccttcttattctatcaccagattgcatggtgatttgtcttctttcttttatcataatgtaatctctaaattcatcggcaaattgtctatatctaaaatcataatatgagatgtttacctctacaaatatctgttcgtccaatgttagagtatttacatcagttttgtattccaaattaaacatggcaacggatttaattttatattcctctattaagtcctcgtcgataataacagaatgtagataatcatttaatccgtcgtacatggttggaagatgcttgttgacaaaatctttaattgtcttgatgaaggtgggactatatctaacatcttgattaataaaatttataacattgtccataggatactttgtaactagttttatacacatctcttcatcggtaagtttagacagaatatcgtgaacaggtggtatattatattcatcagatatacgaagaacaatgtccaaatctatattgtttaatatattatatagatgtagcgtagctcctacaggaatatctttaactaagtcaatgatttcatcaaccgttagatctattttaaagttaatcatataggcattgatttttaaaaggtatgtagccttgactacattctcattaattaaccattccaagtcattgtgtgtaagaagattatattctatcataagcttgactacatttggtcccgataccattaaagaattcttatgatataaggaaacagattttaggtactcatctactctacaagaattttggagagccttaacgatatcagtgacgtttattatttcaggaggaaagaatctaacattgagaatatcggaattaatagcttccagatacagtgattttggcaatagtccgtgtaatccataatccagtaacacgagctggtgcttgctagacaccttttcaatgtttaatttttttgaaataagctttgataaagccttcctcgcaaattccggatacatgaacatgtcggcgacatgattaagtattgttttttcattatttttatattttctcaacaagttctcaataccccaatagatgatagaatatcacccaatgcgtccatgttgtctatttccaacaggtcgctatatccaccaatagaagtttttccaaaaaagattctaggaacagttctaccaccagtaatttgttcaaaataatcccgcaattcattttcgggtttaaattctttaatatcgacaatttcatacgctcctcttttgaaactaaacttatttagaatatccagtgcatttctacaaaaaggacatgtatacttgacaaaaattgtcactttgttattggccaacctttgttgtacaaattcctcggccattttaatatttaagtgatataaaactatctcgacttatttaactctttagtcgagatatatggacgcagatagctatatgatagccaactacagaaggcaaacgctataaaaaacataattacgacgagcatatttataaatatttttattcagcattacttgatatagtaatattaggcacagtcaaacattcaaccactctcgatacattaactctctcattttctttaacaaattctgcaatatcttcgtaaaaagattcttgaaactttttagaatatctatcgactctagatgaaatagcgttcgtcaacatactatgttttgtatacataaaggcgcccattttaacagtttctagtgacaaaatgctagcgatcctaggatcctttagaatcacatagattgacgattcgtctctcttagtaactctagtaaaataatcatacaatctagtacgcgaaataatattatccttgacttgaggagatctaaacaatctagttttgagaacatcgataagttcatcgggaatgacatacatactatctttaatagaactcttttcatccagttgaatggattcgtccttaaccaactgattaatgagatcttctattttatcattttccagatgatatgtatgtccattaaagttaaattgtgtagcgcttctttttagtctagcagccaatactttaacatcactaatatcgatatacaaaggagatgatttatctatggcattaagaattcgtttttcgacatccgtcaaaaccaattcctttttgcctgtatcatccagttttccatcctttgtaaagaaattattttctactagactattaataagactgataaggattcctccataattgcacaatccaaactttttaacaaaactagactttacgagatctacaggaatgcgtacttcaggttttttagcttgtgattttttcttttgcggacattttctagtaaccaactcatctaccatttcattgattttagcagtgaaataagctttcaatgcacgggcactgatactattgaaaacgagttgatcttcaaattccgccatttaagttcaccaaacaacttttaaatacaaatatatcaatagtagtagaataagaactataaaaaaaataataattaaccaaccccaacaaccggtattattagttgatgtggtagttttctcatcacttagaacagatttaacaatttctataaagtctgtcaaatcatcttccggagaccccataaatacaccaaatatagcggcgtacaacttatccatttatacattgaatattggcttttctttatcgctatcttcatcatattcatcatcaatatcaacaagtcccagattacgagccagatcttcttctacattttcagtcattgatacacgttcactatctccagagagtccgataacgttagccaccacttctctatcaatgattagtttcttgagcgcgaaagtaatttttgtttccgttccggatctatagaagacgataggtgtgataattgccttggccaattgtctttctcttttactgagtgattctagttcaccttctatagatctgagaatggatgattctccagtcgaaacatattctaccatggatccgtttaatttgttgatgaagatggattcatccttaaatgttttctctgtaatagtttccaccgaaagactatgcaaagaatttggaatgcgttccttgtgcttaatgtttccatagacggcttctagaagttgatacaacataggactagccgcggtaacttttatttttagaaagtatccatcgcttctatcttgtttagatttatttttataaagtttagtctctccttccaacataataaaagtggaagtcatttgactagataaactatcagtaagttttatagagatagacgaacaattagcgtattgagaagcatttagtgtaacgtattcgatacattttgcattagatttactaatcgattttgcatactctataacacccgcacaagtctgtagagaatcgctagatgcagtaggtcttggtgaagtttcaactctcttcttgattaccttactcatgattaaacctaaataattgtactttgtaatataatgatatatattttcactttatctcatttgagaataaaaatgtttttgtttaaccactgcatgatgtacagatttcggaatcgcaaaccaccagtggttttattttatccttgtccaatgtgaattgaatgggagcggatgcgggtttcgtacgtagatagtacattcccgtttttagaccgagactccatccgtaaaaatgcatactcgttagtttggaataactcggatctgctatatggatattcatagattgactttgatcgatgaaggctcccctgtctgcagccatttttatgatcgtcttttgtggaatttcccaaatagttttataaactcgcttaatatcttctggaaggtttgtattctgaatggatccaccatctgccataatcctattcttgatctcatcattccataattttctctcggttaaaactctaaggagatgcggattaactacttgaaattctccagacaatactctccgagtgtaaatattactggtatacggttccaccgactcattatttcccaaaatttgagcagttgatgcagtcggcataggtgccaccaataaactatttctaagaccgtatgttctgattttatcttttagaggttcccaattccaaagatccgacggtacaacattccaaagatcatattgtagaataccgttactggcgtacgatcctacatatgtatcgtatggtccttccttctcagctagttcacaactcgcctctaatgcaccgtaataaatggtttcgaagatcttcttatttagatcttgtgcttccaggctatcaaatggataatttaagagaataaacgcgtccgctaatccttgaacaccaataccgataggtctatgtctcttattagagatttcagcttctggaataggataataattaatatctataattttattgagatttctgacaattactttgaccacatccttcagtttgagaaaatcaaatcgcccatctattacaaacatgttcaaggcaacagatgccagattacaaacggctacctcattagcatccgcatattgtattatctcagtgcaaagattactacacttgatagttcctaaattttgttgattactctttttgttacacgcatccttataaagaatgaatggagtaccagtttcaatctgagattctataatcgctttccagacgactcgagcctttattatagatttgtatctcctttctctttcgtatagtgtatacaatcgttcgaactcgtctccccaaacattgtccaatccaggacattcatccggacacatcaacgaccactctccgtcatccttcactcgtttcataaagagatcaggaatccaaagagctataaatagatctctggttctatgttcctcgtttcctgtattctttttaagatcgaggaacgccataatatcagaatgccacggttccaagtatatggccataactccaggccgtttgtttcctccctgatctatgtatctagcggtgttattataaactctcaacattggaataataccgtttgatataccattggtaccggagatatagcttccactggcacgaatattactaattgatagacctattccccctgccattttagagattaatgcgcatcgttttaacgtgtcatagataccctctatgctatcatcgatcatgttaagtagaaaacagctagacatttggtgacgactagttcccgcattaaataaggtaggagaagcgtgcgtaaaccatttttcagaaagtagattgtacgtctcaatagctgagtctatatcccattgatgaattcctactgcgacacgcattaacatgtgctgaggtctttcaacgatcttgttgtttattttcaacaagtaggatttttccaaagttttaaaaccaaaatagttgtatgaaaagtctcgttcgtaaataataaccgagttgagtttatccttatatttgttaactatatccatggtgatacttgaaataatcggagaatgtttcccatttttaggattaacatagttgaataaatcctccatcacttcactaaatagtttttttgtttccttgtgtagatttgatacggctattctggcggctagaatggcataatccggatgttgtgtagtacaagtggctgctatttcggctgccagagtgtccaattctaccgttgttactccattatatattccttgaataaccttcatagctattttaataggatctatatgatccgtgtttaagccataacataattttctaatacgagacgtgattttatcaaacatgacattttccttgtatccatttcgtttaatgacaaacatttttgttggtgtaataaaaaaattatttaacttttcattaatagggatttgacgtatgtagcgtacaaaatgattgttcctggtatatagataaagagtcctatatatttgaaaatcgttacggctcgattaaactttaatgattgcatagtgaatatatcattaggatttaactccttgactatcatggcggcgccagaaattaccatcaaaagcattaatacagttataccgatcgcagttagaacggttatagcatccaccatttatatctaaaaattagatcaaagaatatgtgacaaagtcctagttgtatactgagaattgacgaaacaatgtttcttacatatttttttcttattagtaaccgacttaatagtaggaactggaaaactagacttgattattctataagtatagatacccttccaaataatattctctttgataaaagttccagaaaatgtagaattttttaaaaagttatcttttgctattaccaagattgtgtttagacgcttattattaatatgagtgatgaaatccacaccgcctctagatatcgcctttatttccacattagatggtaaatccaatagtgaaactatctttttaggaatgtatggactcgcgtttagaggagtaaacgtcttaggcgtcggaaaggatgattcatcaaacgaataaacaatttcacaaatggatgttaatgtattagtaggaaattttttgacgctattggaattgaagattctaatggatgatgttctacctatttcatccgataacatgttaatttccgacaccaacggttttaatatttcgatgatatacggtagtctctctttcggacttatatagcttattccacaatacgagtcattatatactccaaaaaacaaaataactagtataaaatctgtatcgaatgggaaaaacgaaattatcgacataggtatagaatccggaacattgaacgtattaatacttaattctttttctgtggtaagtaccgataggttattgacattgtatggttttaaatattctataacttgagacttgatagatattagtgatgaattgaaaattatttttatcaccacgtgtgtttcaggatcatcgtcgacgcccgtcaaccaaccgaacggagtaaaataaatatcattaatatatgctctagatattagtatttttatcaatcctttgattatcatcttctcgtaggcgaatgattccatgatcaagagtgatttaagaacatcctccggagtattaatgggcttagtaaacagtccatcgttgcaataataaaagttatccaagttaaaggatattatgcattcgtttaaagatatcacctcatctgacggagacaattttttggtaggttttagagactttgaagctacttgtttaacaaagttattcatcgtcgtctactattctatttaattttgtagttaatttatcacatatcacattaattgactttttggtccacttttccatacgtttatattcttttaatcctgcgttatccgtttccgttatatccagggatagatcttgcaagttaaatagaatgctcttaaataatgtcattttcttatccgctaaaaatttaaagaatgtataaacctttttcagagatttgaaactcttaggtggtgtcctagtacacaatatcataaacaaactaataaacattccacattcagattccaacagctgattaacttccacattaatacagcctattttcgctccaaatgtacattcgaaaaatctgaataaaacatcgatgtcacaatttgtattatccaatacagaatgtttgtgattcgtgttaaaaccatcggagaaggaatagaaataaaaattattatagtggtggaattcagttggaatattgcctccggagtcataaaaggatactaaacattgttttttatcataaattacacatttccaatgagacaaataacaaaatccaaacattacaaatctagaggtagaacttttaattttgtctttaagtatatacgataagatatgtttattcataaacgcgtcaaatttttcatgaatcgctaaggagtttaagaatctcatgtcaaattgtcctatataatccacttcggatccataagcaaactgagagactaagttcttaatacttcgattgctcatccaggctcctctctcaggctctattttcatcttgacgacctttggattttcaccagtatgtattcctttacgtgataaatcatcgattttcaaatccatttgtgagaagtctatcgccttagatactttttcccgtagtcgaggtttaaaaaaatacgctaacggtatactagtaggtaactcaaagacatcatatatagaatggtaacgcgtctttaactcgtcggttaactctttcttttgatcgagttcgtcgctactattgggtctgctcaggtgccccgactctactagttccaacatcataccgataggaatacaagacactttgccggcggttgtagatttatcatatttttccactacatatccgttacaatttgttaaaaatttagatacatctatattgctacataatccagctagtgaatatatatgacataataaattggtaaatcctagttctggtattttactaattactaaatctgtatatctttccatttatcatggaaaagaatttaccagatatcttcttttttccaaactgcgttaatgtattctcttacaaatattcacaagatgaattcagtaatatgagtaaaacggaacgtgatagtttctcattggccgtgtttccagttataaaacatagatggcataacgcacacgttgtaaaacataaaggaatatacaaagttagtacagaagcacgtggaaaaaaagtatctcctccatcactaggaaaacccgcacacataaacctaaccgcgaagcaatatatatacagtgaacacacaataagctttgaatgttatagttttctaaaatgtataacaaatacagaaatcaattcgttcgatgagtatatattaagaggactattagaagctggtaatagtttacagatattttccaattccgtaggtaaacgaacagatactataggtgtactagggaataagtatccatttagcaaaattccattggcctcattaactcctaaagcacaacgagagatattttcagcgtggatttctcatagacctgtagttttaactggaggaactggagtgggtaagacgtcacaggtacccaagttattgctttggtttaattatttatttggtggattctctactctagataaaatcactgactttcacgaaagaccagtcattctatctcttcctaggatagctttagttagattgcatagcaataccattttaaaatcattgggatttaaggtactagatggatctcctatttctttacggtacggatctataccggaagaattaataaacaaacaaccaaaaaaatatggaattgtattttctacccataagttatctctaacaaaactatttagttatggcactcttattatagacgaagttcatgagcatgatcaaataggagatattattatagcagtagcgagaaagcatcatacgaaaatagattctatgtttttaatgactgccacgttagaggatgacagggaacggctaaaagtatttttacctaatcccgcatttatacatattcctggagatacactgtttaaaattagcgaggtatttattcataataagataaatccatcttccagaatggcatacatagaagaagaaaagagaaatttagttactgctatacagatgtatactcctcctgatggatcatccggtatagtctttgtggcatccgttgcacagtgtcacgaatataaatcatatttagaaaaaagattaccgtatgatatgtatattattcatggtaaggtcttagatatagacgaaatattagaaaaagtgtattcatcacctaatgtatcgataattatttctactccttatttggaatccagcgttactatacgcaatgttacacacatttatgatatgggtagagtttttgtccccgctccttttggaggatcgcaacaatttatttctaaatctatgagagatcaacgaaaaggaagagtaggaagagttaatcctggtacatacgtctatttctatgatctgtcttatatgaagtctatacagcgaatagattcagaatttctacataattatatattgtacgctaataagtttaatctaacactccccgaagatttgtttataatccctacaaatttggatattctatggcgtacaaaggaatatatagactcgttcgatattagtacagaaacatggaataaattattatccaattattatatgaagatgatagagtatgctaaactttatgtactaagtcctattctcgctgaggagttggataactttgagaggacgggagaattaactagtattgtacgagaagccattttatctctaaatttacaaattaagattttaaattttaaacataaagatgatgatacgtatatacacttttgtaaaatattattcggtgtctataacggaacaaacgctactatatattatcatagacctctaacgggatatatgaatatgatttcagatactatatttgttcctgtagataataactaaaaatcaaactctaatgaccacatctttttttagagatgaaaaattttccacatctccttttgtagacacgactaaacattttgcagaaaaaagtttattagtgtttagataatcgtatacttcatcagtgtagatagtaaatgtgaacagataaaaggtattcttgctcaatagattggtaaattccatagaatatattaatcctttcttcttgagatcccacatcatttcaaccagagacgttttatccaatgatttacctcgtactataccacatacaaaactagattttgcagtgacgtcgtacctggtattcctaccaaacaaaattttacttttagttcttttagaaaattctaaggtagaatctctatttgccaatatgtcatctatggaattaccactagcaaaaaatgatagaaatatatattgatacatcgcagctggttttgatctactatactttaaaaacgaatcagattccataattgcctgtatatcatcagctgaaaaactatgttttacacgtattccttcggcatttctttttaatgatatatcttgtttagacaatgataaagttatcatgtccatgagagacgcgtctccgtatcgtataaatatttcattagatgttagacgcttcattaggggtatacttctataaggtttcttaatcagtccatcattggttgcgtcaagaactactatcggatgttgttgggtatctctagtgttacacatggccttactaaagtttgggtaaataactatgatatctctattaattatagatgcatatatttcattcgtcaaggatattagtatcgacttgctatcgtcattaatacgtgtaatgtaatcatataaatcatgcgatagccaaggaaaatttaaatagatgttcatcatataatcgtcgctataattcatattaatacgttgacattgactaatttgtaatatagcctcgccacgaagaaagctctcgtattcagtttcatcgataaaggataccgttaaatataactggttgccgatagtctcatagtctattaagtggtaagtttcgtacaaatacagaatccctaaaatattatctaatgttggattaatctttaccataactgtataaaatggagacggagtcataactattttaccgtttgtacttactggaatagatgaaggaataatctccggacatgctggtaaagacccaaatgtctgtttgaagaaatccaatgttccaggtcctaatctcttaacaaaaattacgatattcgatcccgatatcctttgcattctatttaccagcatatcacgaactatattaagattatctatcatgtctattctcccaccgttatataaatcgcctccgctaagaaacgttagtatatccatacaatggaatacttcatttctaaaatagtattcgttttctaattctttaatgtgaaatcgtatactagaaagggaaaaattatctttgagttttccgttagaaaagaaccacgaaactaatgttctgattgcgtccgattccgttgctgaattaatggatttacaccaaaaactcatataacttctagatgtagaagcattcgctaaaaaattagtagaatcaaaggatataagtagatgttccaacaagtgagcaattcccaagatttcatctatatcattctcgaatccgaaattagaaattcccaagtagatatcctttttcatccgatcgttgatgaaaatacgaactttattcggtaagacaatcatttactaaggagtaaaataggaagtaatgttcgtatgtcgttatcatcgtataaattaaaggtgtgttttttaccattaagtgacattataattttaccaatattggaattataatataggtgtatttgcgcactcgcgacggttgatgcatcggtaaatatagctgtatctaatgttctagtcggtatttcatcatttcgctgtctaataatagcgttttctctatctgtttccattacagctgcctgaagtttattggtcggataatatgtaaaataataagaaatacatacgaataacaaaaataaaataagatataataaagatgccatttagagatctaattttgtttaacttgtccaaattcctacttacagaagatgaggaatcgttggagatagtgtcttccttatgtagaggatttgaaatatcttataatgacttgataacttactttccagataggaaataccataaatatatttataaagtatttgaacatgtagatttatcggaggaattaagtatggaattccatgatacaactctgagagatttagtctatcttagattgtacaagtattccaagtgtatacggccgtgttataaattaggagataatctaaaaggcatagttgttataaaggacaggaatatttatattagggaagcaaatgatgacttgatagaatatctcctcaaggaatacactcctcagatttatacatattctaatgagcgcgtccccataactggttcaaaattaattctttgtggattttctcaagttacatttatggcgtatacaacgtcgcatataacaacaaataaaaaggtagatgttctcgtttccaaaaaatgtatagatgaactagtcgatccaataaattatcaaatacttcaaaatttatttgataaaggaagcggaacaataaacaaaatactcaggaagatattttattcggtaacaggtggccaaactccataggtagctttttctatttcggattttagaatttccaaattcaccagcgatttatcggttttggtgaaatccaaggatttattaatgtccacaaatgccatttgttttgtctgtggattgtatttgaaaatggaaacgatgtagttagatagatgcgctgcgaagtttcctattagggttccgcgcttcacgtcacccagcatacttgaatcaccatcctttaaaaaaaatgataagatatcaacatggagtatatcatactcgaattttaattcttctactgactcactgacattttcacaaatactacaatacggtttaccgaaaataatcagtacgttcttcatttatgggtatcaaaaacttaaaatcgttactgctggaaaataaatcactgacgatattagatgataatttatacaaagtatacaatggaatatttgtggatacaatgagtatttatatagccgtcgccaattgtgtcagaaacttagaagagttaactacggtattcataaaatacgtaaacggatgggtaaaaaagggagggcatgtaaccctttttatcgatagaggaagtataaaaattaaacaagacgttagagacaagagacgtaaatattctaaattaaccaaggacagaaaaatgttagaattagaaaagtgtacatccgaaatacaaaatgttaccggatttatggaagaagaaataaaggcagaaatgcaattaaaaatcgataaactcacatttcaaatatatttatctgattctgataacataaaaatatcattgaatgagatactaacacatttcaacaataatgagaatgttacattattttattgtgatgaacgagacgcagaattcgttatgtgtctcgaggctaaaacacatttctctaccacaggagaatggccgttgataataagtaccgatcaggatactatgctatttgcatctgctgataatcatcctaagatgataaaaaacttaactcaactgtttaaatttgttccctcggcagaggataactatttagcaaaattaacggcgttagtgaatggatgtgatttctttcctggactctatggggcatctataacacccaccaacttaaacaaaatacaattgtttagtgattttacaatcgataatatagtcactagtttggcaattaaaaattattatagaaagactaactctaccgtagacgtgcgtaatattgttacgtttataaacgattacgctaatttagacgatgtctactcgtatattcctccttgtcaatgcactgttcaagaatttatattttccgcattagatgaaaaatggaatgaatttaaatcatcttatttagaaagcgtgccgttaccctgccaattaatgtacgcgttagaaccacgcaaggagattgatgtttcagaagttaaaactttatcatcttatatagatttcgaaaatactaaatcagatatcgatgttataaaatctatatcctcgatcttcggatattctaacgaaaactgtaacacgatagtattcggcatctataaggataatttactactgagtataaataattcattttactttaacgatagtctgttaataaccaatactaaaagtgataatataataaatataggttactagattaaaaatggtgttccaactcgtgtgctctacatgcggtaaagatatttctcacgaacgatataaattgattatacgaaaaaaatcattaaaggatgtactcgtcagtgtaaagaacgaatgttgtaggttaaaattatctacacaaatagaacctcaacgtaacttaacagtgcaacctctattggatataaactaatatggatccggttaattttatcaagacatatgcgcctagaggttctattatttttattaattataccatgtcattaacaagtcatttgaatccatcgatagaaaaacatgtgggtatttattatggtacgttattatcggaacacttggtagttgaatctacctatagaaaaggagttcgaatagtcccattggatagtttttttgaaggatatcttagtgcaaaagtatacatgttagagaatattcaagttatgaaaatagcagctgatacgtcattaactttattgggtattccgtatggatttggtcatgatagaatgtattgttttaaattggtagctgactgttataaaaatgccggtattgatacatcgtctaaacgaatattgggcaaagatatttttctgagccaaaacttcacagacgataatagatggataaagatatatgattctaataatttaacattttggcaaattgattaccttaaagggtgagttaatatgcataactactcctccgttgttttttccctcgttctttttcttaacgttgtttgccatcactctcataatgtaaagatattctaaaatggtaaacttttgcatatcggacgcagaaattggtataaatgttgtaattgtattatttcccgtcaatggactagtcacagctccatcagttttatatcctttagagtatttctcactcgtgtctaacattctagagcattccatgatctgtttatcgttgatattggccggaaagatagattttttattttttattatattactattggcaattgtagatataacttctggtaaatatttttctaccttttcaatctcttctattttcaagccggctatatattctgctatattgttgctagtatcaataccttttctggctaagaagtcatatgtggtattcactatatcagttttaactggtagttccattagcctttccacttctgcagaataatcagaaattggttctttaccagaaaatccagctactataataggctcaccgatgatcattggcaaaatcctatattgtaccagattaatgagagcatatttcatttccaataattctgctagttcttgagacattgatttatttgatgaatctagttggttctctagatactctaccatttctgccgcatacaataacttgttagataaaatcagggttatcaaagtgtttagcgtggctagaatagtgggcttgcatgtattaaagaatgcggtagtatgagtaaaccgttttaacgaattatatagtctccagaaatctgtggcgttacatacatgagccgaatgacatcgaagattgtccaatatttttaatagctgctctttgtccattatttctatatttgactcgcaacaattgtagataccattaatcaccgattcctttttcgatgccggacaatagcacaattgtttagctttggactctatgtattcagaattaatagatatatctctcaatacagattgcactatacattttgaaactatgtcaaaaattgtagaacgacgctgttctgcagccatttaactttaaataatttacaaaaatttaaaatgagcatccgtataaaaatcgataaactgcgccaaattgtggcatatttttcagagttcagtgaagaagtgtctataaatgtagactcgacggatgagttaatgtatatttttgccgccttgggcggatctgtaaacatttgggcaattatacctctaagtgcatcagtgttttaccgaggagccgaaaatattgtgtttaatcttcctgtgtccaaggtaaaatcgtgtttgtgtagttttcacaatgatgccatcatagatatagaacctgatctggaaaataatctagtaaaactttctagttatcatgtagtaagtgtcgattgtaacaaggaactgatgcctattaggacagatactactatttgtctaagtatagatcaaaagaaatcttacgtgtttaattttcacaagtatgaagaaaaatgttgtggtagaaccgtcattcatctagaatggttgttgggctttatcaagtgtattagtcagcatcagcatctggctattatgtttaaagatgacaatattattatgaagactcctggtaatactgatgcgttttccagggaatattctatgactgaatgttctcaagaactacaaaagttttctttcaaaatagctatctcgtctctcaacaaactacgaggattcaaaaagagagtcaatgtttttgaaactagaatcgtaatggataatgacgataacattttaggaatgttgttttcggatagagttcaatcctttaagatcaacatctttatggcgtttttagattaatactttcaatgagataaatatgggtggcggagtaagtgttgagctccctaaacgggatccgcctccgggagtacccactgatgagatgttattaaacgtggataaaatgcatgacgtgatagctcccgctaagcttttagaatatgtgcatataggaccactagcaaaagataaagaggataaagtaaagaaaagatatccagagtttagattagtcaacacaggacccggtggtctttcggcattgttaagacaatcgtataatggaaccgcacccaattgctgtcgcacttttaatcgtactcattattggaagaaggatggaaagatatcagataagtatgaagagggtgcagtattagaatcgtgttggccagacgttcacgacactggaaaatgcgatgttgatttattcgactggtgtcagggggatacgttcgatagaaacatatgccatcagtggatcggttcagcctttaataggagtaatagaactgtagagggtcaacaatcgttaataaatctgtataataagatgcaaacattatgtagtaaagatgctagtgtaccaatatgcgaatcatttttgcattatttacgcgcacacaatacagaagatagcaaagagatgatcgattatattctaagacaacagtctgcggactttaaacagaaatatatgagatgtagttatcccactagagataagttagaagagtcattaaaatatgcggaacctcgagaatgttgggatccagagtgttcgaatgccaatgttaatttcttactaacacgtaattataataatttaggactttgcaatattgtacgatgtaataccagcgtgaacaacttacagatggataaaacttcctcattaagattgtcatgtggattaagcaatagtgatagattttctactgttcccgtcaatagagcaaaagtagttcaacataatattaaacactcgttcgacctaaaattgcatttgatcagtttattatctctcttggtaatatggatactaattgtagctatttaaatgggtgccgcggcaagcatacagacgacggtgaatacactcagcgaacgtatctcgtctaaattagaacaagaagcgaacgctagtgctcaaacaaaatgtgatatagaaatcggaaatttttatatccgacaaaaccatggatgtaacctcactgttaaaaatatgtgctctgcggacgcggatgctcagttggatgctgtgttatcagccgctacagaaacatatagtggattaacaccggaacaaaaagcatacgtgccagctatgtttactgctgcgttaaacattcagacgagtgtaaacactgttgttagagattttgaaaattatgtgaaacagacttgtaattctagcgcggtcgtcgataacaaattaaagatacaaaacgtaatcatagatgaatgttacggagccccaggatctccaacaaatttggaatttattaatacaggatctagcaaaggaaattgtgccattaaagcgttgatgcaattgacgactaaggccactactcaaatagcacctagacaagttgctggtacaggagttcagttttatatgattgttatcggtgttataatattggcagcgttgtttatgtactatgccaagcgtatgttgttcacatccaccaatgataaaatcaaacttattttagccaataaggaaaacgtccattggactacttacatggacacattctttagaacttctccgatggttattgctaccacggatatgcaaaactgaaaatatattgataatattttaatagattaacatggaagttatcgctgatcgtctagacgatatagtgaaacaaaatatagcggatgaaaaatttgtagattttgttatacacggtctagagcatcaatgtcctgctatacttcgaccattaattaggttgtttattgatatactattatttgttatagtaatttatatttttacggtacgtctagtaagtagaaattatcaaatgttgttggtggtgctagtcatcacattaactattttttattactttatactataatagtactagactgacttctaacaaacatctcacctgccataaataaatgcttgatattaaagtcttctatttctaacactattccatctgtggaaaataatactctgacattatcgctaattgacacatcggtgagtgatatgcctataaagtaataatcttctttgggcacatataccagtgtaccaggttctaacaacctatttactggtgctcctgtagcatactttttctttaccttgagaatatccatcgtttgcttggtcaatagcgatatgtgattttttatcaaccactcaaaaaagtaattggagtgttcatatcctctacgggctattgtctcatggccgtgtatgaaatttaagtaacacgactgtggtagatttgttctatagagccgattgccgcaaatagatagaactaccaatatgtctgtacaaatgttaaacattaattgattaacagaaaaaacaatgttcgttctgggaatagaaaccagatcaaaacaaaattcgttagaatatatgccacgtttatacatggaatataaaataactacagtttgaaaaataacagtatcatttaaacatttaacttgcggggttaatctcacaactttactgtttttgaactgttcaaaatatagcatcgatccgtgagaaatacgtttagccgcctttaatagaggaaatcccaccgcctttctggatctcaccaacgacgatagttctgaccagcaactcatttcttcatcatccacctgttttaacatataataggcaggagatagatatccgtcattgcaatattccttctcgtaggcacacaatctaatattgataaaatctccattctcttctctgcatttattatcttgtctcggtggctgattaggctgtggtcttggtttaggccttggtctatcgttgttgaatctattttggtcattaaatctttcatttcttcctggtatatttctatcacctcgtttggttggatttttgtctatattatcgtttgtaacatcggtacgggtattcatttatcacaaaaaaaacttctctaaatgagtctactgctagaaaacctcatcgaagaagataccatattttttgcaggaagtatatctgagtatgatgatttacaaatggttattgccggcgcaaaatccaaatttccaagatctatgctttctatttttaatatagtacctagaacgatgtcaaaatatgagttggagttgattcataacgaaaatatcacaggagcaatgtttaccacaatgtataatataagaaacaatttgggtctaggagatgataaactaactattgaagccattgaaaactatttcttggatcctaacaatgaagttatgcctcttattattaataatacggatatgactgccgtcattcctaaaaaaagtggtaggagaaagaataagaacatggttatcttccgtcaaggatcatcacctatcttgtgcattttcgaaactcgtaaaaagattaatatttataaagaaaatatggaatccgcgtcgactgagtatacacctatcggagacaacaaggctttgatatctaaatatgcgggaattaatgtcctgaatgtgtattctccttccacatccataagattgaatgccatttacggattcaccaataaaaataaactagagaaacttagtactaataaggaactagaatcgtatagttctagccctcttcaagaacccattaggttaaatgattttctgggactattggaatgtgttaaaaagaatattcctctaacagatattccgacaaaggattgattactataaatggagaatgttcctaatgtatactttaatcctgtgtttatagagcccacgtttaaacattctttattaagtgtttataaacacagattaatagttttatttgaagtattcgttgtattcattctaatatatgtattttttagatctgaattaaatatgttcttcatgcctaaacgaaaaatacccgatcctattgatagattacgacgtgctaatctagcgtgtgaagacgataaattaatgatctatggattaccatggatgacaactcaaacatctgcgttatcaataaatagtaaaccgatagtgtataaagattgtgcaaagcttttgcgatcaataaatggatcacaaccagtatctcttaacgatgttcttcgcagatgatgattcattttttaagtatttggctagtcaagatgatgaatcttcattatctgatatattgcaaatcactcaatatctagactttctgttattattattgatccaatcaaaaaataaattagaagctgtgggtcattgttatgaatctctttcagaggaatacagacaattgacaaaattcacagactttcaagattttaaaaaactgtttaacaaggtccctattgttacagatggaagggtcaaacttaataaaggatatttgttcgactttgtgattagtttgatgcgattcaaaaaagaatcctctctagctaccaccgcaatagatcctgttagatacatagatcctcgtcgcaatatcgcattttctaacgtgatggatatattaaagtcgaataaagtgaacaataattaattctttattgtcatcatgaacggcggacatattcagttgataatcggccccatgttttcaggtaaaagtacagaattaattagacgagttagacgttatcaaatagctcaatataaatgcgtgactataaaatattctaacgataatagatacggaacgggactatggacgcatgataagaataattttgaagcattggaagcaactaaactatgtgatgtcttggaatcaattacagatttctccgtgataggtatcgatgaaggacagttctttccagacattgttgaattagatcgataaaaattaattaattacccgggtaccaggcctagatctgtcgagatccggtggtggtgcaaatcaaagaactgctcctcagtggatgttgcctttacttctaggcctgtacggaagtgttacttctgctctaaaagctgctgcagggggggggggggggtgggggggccggttagggccgccatcccctcagagcgtcgggatatcgggtggcggctcgggacggaggacgcgctagtgttcttctgtgtggcagttcagaatgatggatcaagctagatcagcattctctaacttgtttggtggagaaccattgtcatatacccggttcagcctggctcggcaagtagatggcgataacagtcatgtggagatgaaacttgctgtagatgaagaagaaaatgctgacaataacacaaaggccaatgtcacaaaaccaaaaaggtgtagtggaagtatctgctatgggactattgctgtgatcgtctttttcttgattggatttatgattggctacttgggctattgtaaaggggtagaaccaaaaactgagtgtgagagactggcaggaaccgagtctccagtgagggaggagccaggagaggacttccctgcagcacgtcgcttatattgggatgacctgaagagaaagttgtcggagaaactggacagcacagacttcaccagcaccatcaagctgctgaatgaaaattcatatgtccctcgtgaggctggatctcaaaaagatgaaaatcttgcgttgtatgttgaaaatcaatttcgtgaatttaaactcagcaaagtctggcgtgatcaacattttgttaagattcaggtcaaagacagcgctcaaaactcggtgatcatagttgataagaacggtagacttgtttacctggtggagaatcctgggggttatgtggcgtatagtaaggctgcaacagttactggtaaactggtccatgctaattttggtactaaaaaagattttgaggatttatacactcctgtgaatggatctatagtgattgtcagagcagggaaaatcacctttgcagaaaaggttgcaaatgctgaaagcttaaatgcaattggtgtgttgatatacatggaccagactaaatttcccattgttaacgcagaactttcattctttggacatgctcatctggggacaggtgacccttacacacctggattcccttccttcaatcacactcagtttccaccatctcggtcatcaggattgcctaatatacctgtccagacaatctccagagctgctgcagaaaagctgtttgggaatatggaaggagactgtccctctgactggaaaacagactctacatgtaggatggtaacctcagaaagcaagaatgtgaagctcactgtgagcaatgtgctgaaagagataaaaattcttaacatctttggagttattaaaggctttgtagaaccagatcactatgttgtagttggggcccagagagatgcatggggccctggagctgcaaaatccggtgtaggcacagctctcctattgaaacttgcccagatgttctcagatatggtcttaaaagatgggtttcagcccagcagaagcattatctttgccagttggagtgctggagactttggatcggttggtgccactgaatggctagagggatacctttcgtccctgcatttaaaggctttcacttatattaatctggataaagcggttcttggtaccagcaacttcaaggtttctgccagcccactgttgtatacgcttattgagaaaacaatgcaaaatgtgaagcatccggttactgggcaatttctatatcaggacagcaactgggccagcaaagttgagaaactcactttagacaatgctgctttccctttccttgcatattctggaatcccagcagtttctttctgtttttgcgaggacacagattatccttatttgggtaccaccatggacacctataaggaactgattgagaggattcctgagttgaacaaagtggcacgagcagctgcagaggtcgctggtcagttcgtgattaaactaacccatgatgttgaattgaacctggactatgagaggtacaacagccaactgctttcatttgtgagggatctgaaccaatacagagcagacataaaggaaatgggcctgagtttacagtggctgtattctgctcgtggagacttcttccgtgctacttccagactaacaacagatttcgggaatgctgagaaaacagacagatttgtcatgaagaaactcaatgatcgtgtcatgagagtggagtatcacttcctctctccctacgtatctccaaaagagtctcctttccgacatgtcttctggggctccggctctcacacgctgccagctttactggagaacttgaaactgcgtaaacaaaataacggtgcttttaatgaaacgctgttcagaaaccagttggctctagctacttggactattcagggagctgcaaatgccctctctggtgacgtttgggacattgacaatgagttttaaatgtgatacccatagcttccatgagaacagcagggtagtctggtttctagacttgtgctgatcgtgctaaattttcagtagggctacaaaacctgatgttaaaattccatcccatcatcttggtactactagatgtctttaggcagcagcttttaatacagggtagataacctgtacttcaagttaaagtgaataaccacttaaaaaatgtccatgatggaatattcccctatctctagaattttaagtgctttgtaatgggaactgcctctttcctgttgttgttaatgaaaatgtcagaaaccagttatgtgaatgatctctctgaatcctaagggctggtctctgctgaaggttgtaagtggtcgcttactttgagtgatcctccaacttcatttgatgctaaataggagataccaggttgaaagaccttctccaaatgagatctaagcctttccataaggaatgtagctggtttcctcattcctgaaagaaacagttaactttcagaagagatgggcttgttttcttgccaatgaggtctgaaatggaggtccttctgctggataaaatgaggttcaactgttgattgcaggaataaggccttaatatgttaacctcagtgtcatttatgaaaagaggggaccagaagccaaagacttagtatattttcttttcctctgtcccttcccccataagcctccatttagttctttgttatttttgtttcttccaaagcacattgaaagagaaccagtttcaggtgtttagttgcagactcagtttgtcagactttaaagaataatatgctgccaaattttggccaaagtgttaatcttaggggagagctttctgtccttttggcactgagatatttattgtttatttatcagtgacagagttcactataaatggtgtttttttaatagaatataattatcggaagcagtgccttccataattatgacagttatactgtcggttttttttaaataaaagcagcatctgctaataaaacccaacagatactggaagttttgcatttatggtcaacacttaagggttttagaaaacagccgtcagccaaatgtaattgaataaagttgaagctaagatttagagatgaattaaatttaattaggggttgctaagaagcgagcactgaccagataagaatgctggttttcctaaatgcagtgaattgtgaccaagttataaatcaatgtcacttaaaggctgtggtagtactcctgcaaaattttatagctcagtttatccaaggtgtaactctaattcccattttgcaaaatttccagtacctttgtcacaatcctaacacattatcgggagcagtatcttccataatgtataaagaacaaggtagtttttacctaccacagtgtctgtatcggagacagtgatctccatatgttacactaagggtgtaagtaattatcgggaacagtgtttcccataattttcttcatgcaatgacatcttcaaagcttgaagatcgttagtatctaacatgtatcccaactcctataattccctatcttttagttttagttgcagaaacattttgtggtcattaagcattgggtgggtaaattcaaccactgtaaaatgaaattactacaaaatttgaaatttagcttgggtttttgttacctttatggtttctccaggtcctctacttaatgagatagtagcatacatttataatgtttgctattgacaagtcattttaactttatcacattatttgcatgttacctcctataaacttagtgcggacaagttttaatccagaattgaccttttgacttaaagcagagggactttgtatagaaggtttgggggctgtggggaaggagagtcccctgaaggtctgacacgtctgcctacccattcgtggtgatcaattaaatgtaggtatgaataagttcgaagctccgtgagtgaaccatcattataaacgtgatgatcagctgtttgtcatagggcagttggaaacggcctcctagggaaaagttcatagggtctcttcaggttcttagtgtcacttacctagatttacagcctcacttgaatgtgtcactactcacagtctctttaatcttcagttttatctttaatctcctcttttatcttggactgacatttagcgtagctaagtgaaaaggtcatagctgagattcctggttcgggtgttacgcacacgtacttaaatgaaagcatgtggcatgttcatcgtataacacaatatgaatacagggcatgcattttgcagcagtgagtctcttcagaaaacccttttctacagttagggttgagttacttcctatcaagccagtacgtgctaacaggctcaatattcctgaatgaaatatcagactagtgacaagctcctggtcttgagatgtcttctcgttaaggagatgggccttttggaggtaaaggataaaatgaatgagttctgtcatgattcactattctagaacttgcatgacctttactgtgttagctctttgaatgttcttgaaattttagactttctttgtaaacaaatgatatgtccttatcattgtataaaagctgttatgtgcaacagtgtggagattccttgtctgatttaataaaatacttaaacactgaaaaaaaaaaaaaaaaaaaaaaaaaaaaaaaaaaaaaaaaaaaaaaaaaaaaaaaaaaaaaaaaaaaaaaaaaaaaaaaaagtaccttctgaggcggaaagaaccagccggatctcgacttcgagcttatttatattccaaaaaaaaaaaataaaatttcaatttttaagctttcactaattccaaacccacccgctttttatagtaagtttttcacccataaataataaatacaataattaatttctcgtaaaagtagaaaatatattctaatttattgcacggtaaggaagtagatcataactcgagcatgggagatcccgtcgttttacaacgtcgtgactgggaaaaccctggcgttacccaacttaatcgccttgcagcacatccccctttcgccagctggcgtaatagcgaagaggcccgcaccgatcgcccttcccaacagttgcgcagcctgaatggcgaatggcgctttgcctggtttccggcaccagaagcggtgccggaaagctggctggagtgcgatcttcctgaggccgatactgtcgtcgtcccctcaaactggcagatgcacggttacgatgcgcccatctacaccaacgtgacctatcccattacggtcaatccgccgtttgttcccacggagaatccgacgggttgttactcgctcacatttaatgttgatgaaagctggctacaggaaggccagacgcgaattatttttgatggcgttaactcggcgtttcatctgtggtgcaacgggcgctgggtcggttacggccaggacagtcgtttgccgtctgaatttgacctgagcgcatttttacgcgccggagaaaaccgcctcgcggtgatggtgctgcgctggagtgacggcagttatctggaagatcaggatatgtggcggatgagcggcattttccgtgacgtctcgttgctgcataaaccgactacacaaatcagcgatttccatgttgccactcgctttaatgatgatttcagccgcgctgtactggaggctgaagttcagatgtgcggcgagttgcgtgactacctacgggtaacagtttctttatggcagggtgaaacgcaggtcgccagcggcaccgcgcctttcggcggtgaaattatcgatgagcgtggtggttatgccgatcgcgtcacactacgtctgaacgtcgaaaacccgaaactgtggagcgccgaaatcccgaatctctatcgtgcggtggttgaactgcacaccgccgacggcacgctgattgaagcagaagcctgcgatgtcggtttccgcgaggtgcggattgaaaatggtctgctgctgctgaacggcaagccgttgctgattcgaggcgttaaccgtcacgagcatcatcctctgcatggtcaggtcatggatgagcagacgatggtgcaggatatcctgctgatgaagcagaacaactttaacgccgtgcgctgttcgcattatccgaaccatccgctgtggtacacgctgtgcgaccgctacggcctgtatgtggtggatgaagccaatattgaaacccacggcatggtgccaatgaatcgtctgaccgatgatccgcgctggctaccggcgatgagcgaacgcgtaacgcgaatggtgcagcgcgatcgtaatcacccgagtgtgatcatctggtcgctggggaatgaatcaggccacggcgctaatcacgacgcgctgtatcgctggatcaaatctgtcgatccttcccgcccggtgcagtatgaaggcggcggagccgacaccacggccaccgatattatttgcccgatgtacgcgcgcgtggatgaagaccagcccttcccggctgtgccgaaatggtccatcaaaaaatggctttcgctacctggagagacgcgcccgctgatcctttgcgaatacgcccacgcgatgggtaacagtcttggcggtttcgctaaatactggcaggcgtttcgtcagtatccccgtttacagggcggcttcgtctgggactgggtggatcagtcgctgattaaatatgatgaaaacggcaacccgtggtcggcttacggcggtgattttggcgatacgccgaacgatcgccagttctgtatgaacggtctggtctttgccgaccgcacgccgcatccagcgctgacggaagcaaaacaccagcagcagtttttccagttccgtttatccgggcaaaccatcgaagtgaccagcgaatacctgttccgtcatagcgataacgagctcctgcactggatggtggcgctggatggtaagccgctggcaagcggtgaagtgcctctggatgtcgctccacaaggtaaacagttgattgaactgcctgaactaccgcagccggagagcgccgggcaactctggctcacagtacgcgtagtgcaaccgaacgcgaccgcatggtcagaagccgggcacatcagcgcctggcagcagtggcgtctggcggaaaacctcagtgtgacgctccccgccgcgtcccacgccatcccgcatctgaccaccagcgaaatggatttttgcatcgagctgggtaataagcgttggcaatttaaccgccagtcaggctttctttcacagatgtggattggcgataaaaaacaactgctgacgccgctgcgcgatcagttcacccgtgcaccgctggataacgacattggcgtaagtgaagcgacccgcattgaccctaacgcctgggtcgaacgctggaaggcggcgggccattaccaggccgaagcagcgttgttgcagtgcacggcagatacacttgctgatgcggtgctgattacgaccgctcacgcgtggcagcatcaggggaaaaccttatttatcagccggaaaacctaccggattgatggtagtggtcaaatggcgattaccgttgatgttgaagtggcgagcgatacaccgcatccggcgcggattggcctgaactgccagctggcgcaggtagcagagcgggtaaactggctcggattagggccgcaagaaaactatcccgaccgccttactgccgcctgttttgaccgctgggatctgccattgtcagacatgtataccccgtacgtcttcccgagcgaaaacggtctgcgctgcgggacgcgcgaattgaattatggcccacaccagtggcgcggcgacttccagttcaacatcagccgctacagtcaacagcaactgatggaaaccagccatcgccatctgctgcacgcggaagaaggcacatggctgaatatcgacggtttccatatggggattggtggcgacgactcctggagcccgtcagtatcggcggaattccagctgagcgccggtcgctaccattaccagttggtctggtgtcaaaaataataataaccgggcaggggggatccaattctgtgagcgtatggcaaacgaaggaaaaatagttatagtagccgcactcgatgggacatttcaacgtaaaccgtttaataatattttgaatcttattccattatctgaaatggtggtaaaactaactgctgtgtgtatgaaatgctttaaggaggcttccttttctaaacgattgggtgaggaaaccgagatagaaataataggaggtaatgatatgtatcaatcggtgtgtagaaagtgttacatcgactcataatattatattttttatctaaaaaactaaaaataaacattgattaaattttaatataatacttaaaaatggatgttgtgtcgttagataaaccgtttatgtattttgaggaaattgataatgagttagattacgaaccagaaagtgcaaatgaggtcgcaaaaaaactgccgtatcaaggacagttaaaactattactaggagaattattttttcttagtaagttacagcgacacggtatattagatggtgccaccgtagtgtatataggatctgctcccggtacacatatacgttatttgagagatcatttctataatttaggagtgatcatcaaatggatgctaattgacggccgccatcatgatcctattttaaatggattgcgtgatgtgactctagtgactcggttcgttgatgaggaatatctacgatccatcaaaaaacaactgcatccttctaagattattttaatttctgatgtgagatccaaacgaggaggaaatgaacctagtacggcggatttactaagtaattacgctctacaaaatgtcatgattagtattttaaaccccgtggcgtctagtcttaaatggagatgcccgtttccagatcaatggatcaaggacttttatatcccacacggtaataaaatgttacaaccttttgctccttcatattcagctgaaatgagattattaagtatttataccggtgagaacatgagactgactcgagttaccaaattagacgctgtaaattatgaaaaaaagatgtactaccttaataagatcgtccgtaacaaagtagttgttaactttgattatcctaatcaggaatatgactattttcacatgtactttatgctgaggaccgtgtactgcaataaaacatttcctactactaaagcaaaggtactatttctacaacaatctatatttcgtttcttaaatattccaacaacatcaactgaaaaagttagtcatgaaccaatacaacgtaaaatatctagcaaaaattctatgtctaaaaacagaaatagcaagagatccgtacgcggtaataaatagaaacgtactactgagatatactaccgatatagagtataatgatttagttactttaataaccgttagacataaaattgattctatgaaaactgtgtttcaggtatttaacgaatcatccataaattatactccggttgatgatgattatggagaaccaatcattataacatcgtatcttcaaaaaggtcataacaagtttcctgtaaattttctatacatagatgtggtaatatctgacttatttcctagctttgttagactagatactacagaaactaatatagttaatagtgtactacaaacaggcgatggtaaaaagactcttcgtcttcccaaaatgttagagacggaaatagttgtcaagattctctatcgccctaatataccattaaaaattgttagatttttccgcaataacatggtaactggagtagagatagccgatagatctgttatttcagtcgctgattaatcaattagtagagatgagataagaacattataataatcaataatatatcttatatcttatatcttatatcttatatcttgtttagaaaaatgctaatattaaaatagctaacgctagtaatccaatcggaagccatttgatatctataatagggtatctaatttcctgatttaaatagcggacagctatattctcggtagctactcgtttggaatcacaaacattatttacatctaatttactatctgtaatggaaacgtttcccaatgaaatggtacaatccgatacattgcattttgttatatttttttttaaagaggctggtaacaacgcatcgcttcgtttacatggctcgtaccaacaataatagggtaatcttgtatctattcctatccgtactatgcttttatcaggataaatacatttacatcgtatatcgtctttgttagcatcacagaatgcataaatttgttcgtccgtcatgataaaaatttaaagtgtaaatataactattatttttatagttgtaataaaaagggaaatttgattgtatactttcggttctttaaaagaaactgacttgataaaaatggctgtaatctctaaggttacgtatagtctatatgatcaaaaagagattaatgctacagatattatcattagtcatgttaaaaatgacgacgatatcggtaccgttaaagatggtagactaggtgctatggatggggcattatgtaagacttgtgggaaaacggaattggaatgtttcggtcactggggtaaagtaagtatttataaaactcatatagttaagcctgaatttatttcagaaattattcgtttactgaatcatatatgtattcactgcggattattgcgttcacgagaaccgtattccgacgatattaacctaaaagagttatcgggacacgctcttaggagattaaaggataaaatattatccaagaaaaagtcatgttggaacagtgaatgtatgcaaccgtatcaaaaaattactttttcaaagaaaaaggtttgtttcgtcaacaagttggatgatattaacgttcctaattctctcatctatcaaaagttaatttctattcatgaaaagttttggccattattagaaattcatcaatatccagctaacttattttatacagactactttcccatccctccgttgattattagaccggctattagtttttggatagatagtatacccaaagagaccaatgaattaacttacttattaggtatgatcgttaagaattgtaacttgaatgctgatgaacaggttatccagaaggcggtaatagaatacgatgatattaaaattatttctaataacactaccagtatcaatttatcatatattacatccggcaaaaataatatgattagaagttatatcgtcgcccgacgaaaagatcagaccgctagatctgtaattggtcccagtacatctatcaccgttaatgaggtaggaatgcccgcatatattagaaatacacttacagaaaagatatttgttaatgcctttacagtggataaagttaaacaactattagcgtcaaaccaagttaaattttactttaataaacgattaaaccaattaacaagaatacgccaaggaaagtttattaaaaataaaatacatttattgcctggtgattgggtagaagtagctgttcaagaatatacaagtattatttttggaagacagccgtctctacatagatacaacgtcatcgcttcatctatcagagctaccgaaggagatactatcaaaatatctcccggaattgccaactctcaaaatgctgatttcgacggggatgaggaatggatgatattagaacaaaatcctaaagctgtaattgaacaaagtattcttatgtatccgacgacgttactcaaacacgatattcatggagcccccgtttatggatctattcaagatgaaatcgtagcagcgtattcattgtttaggatacaagatctttgtttagatgaagtattgaacatcttggggaaatatggaagagagttcgatcctaaaggtaaatgtaaattcagcggtaaagatatctatacttacttgataggtgaaaagattaattatccgggtctcttaaaggatggtgaaattattgcaaacgacgtagatagtaattttgttgtggctatgaggcatctgtcattggctggactcttatccgatcataagtcgaacgtggaaggtatcaactttattatcaagtcatcttatgtttttaagagatatctatctatttacggttttggggtgacattcaaagatctgagaccaaattcgacgttcactaataaattggaggccatcaacgtagaaaaaatagaacttatcaaagaagcatacgccaaatatctcaacgatgtaagagacgggaaaatagttccattatctaaagctttagaggcggactatgtggaatccatgttatccaacttgacaaatcttaatatccgagagatagaagaacatatgagacaaacgctgatagatgatccagataataacctcctgaaaatggccaaagcgggttataaagtaaatcccacagaactaatgtatattctaggtacgtatggacaacaaaggattgatggtgaaccagcagagactcgagtattgggtagagttttaccttactatcttccagactctaaggatccagaaggaagaggttacattcttaattctttaacaaaaggattaacgggttctcaatattacttttcgatgctggttgccagatctcaatctactgatatcgtctgtgaaacatcacgtaccggaacactggctagaaaaatcattaaaaagatggaggatatggtggtcgacggatacggacaagtagttataggtaatacgctcatcaagtacgccgccaattataccaaaattctaggctcagtatgtaaacctgtagatcttatctatccagatgagtccatgacttggtatttggaaattagtgctctgtggaataaaataaaacagggattcgtttactctcagaaacagaaacttgcaaagaagacattggcgccgtttaatttcctagtattcgtcaaacccaccactgaggataatgctattaaggttaaggatctgtacgatatgattcataacgtcattgatgatgtgagagagaaatacttctttacggtatctaatatagattttatggagtatatattcttgacgcatcttaatccttctagaattagaattacaaaagaaacggctatcactatctttgaaaagttctatgaaaaactcaattatactctaggtggtggaactcctattggaattatttctgcacaggtattgtctgagaagtttacacaacaagccctgtccagttttcacactactgaaaaaagtggtgccgtcaaacaaaaacttggtttcaacgagtttaataacttgactaatttgagtaagaataagaccgaaattatcactctggtatccgatgatatctctaaacttcaatctgttaagattaatttcgaatttgtatgtttgggagaattaaatccaaacatcactcttcgaaaagaaacagataaatatgtagtagatataatagtcaatagattatacatcaagagagcagaaataaccgaattagtcgtcgaatatatgattgaacgatttatctcctttagcgtcattgtaaaggaatggggtatggagacattcattgaggacgaggataatattagatttactgtctacctaaatttcgttgaaccggaagaattgaatcttagtaagtttatgatggttcttccgggggcagccaacaagggaaagattagtaaattcaagattcctatctctgattatacgggatatgacgacttcaatcaaacaaaaaagctcaataagatgactgtagaactcatgaatctaaaagaattgggttctttcgatttggaaaacgtcaacgtgtatcctggagtatggaatacatacgatatcttcggtatcgaggccgctcgtgaatacttgtgcgaagccatgttaaacacctatggagaagggttcgattatctgtatcagccttgtgatcttctcgctagtttactatgtgctagttacgaaccagaatcagtgaataaattcaagttcggcgcagctagtactcttaagagagctacgttcggagacaataaagcattgttaaacgcggctcttcataaaaagtcagaacctattaacgataatagtagctgccacttttttagcaaggtccctaatataggaactggatattacaaatactttatcgacttgggtcttctcatgagaatggaaaggaaactatctgataagatatcttctcaaaagatcaaggaaatggaagaaacagaagacttttaattcttatcaataacatatttttctatgatctgtcttttaaacgatggattttccacaaatgcgcctctcaagtccctcatagaatgatacacgtataaaaaatatagcataggcaatgactccttatttttagacattagatatgccaaaatcatagccccgcttctatttactcccgcagcacaatgaaccaacacgggctcgtttcgttgatcacatttagataaaaaggcggttacgtcgtcaaaatatttactaatatcggtagttgtatcatctaccaacggtatatgaataatattaatattagagttaggtaatgtatatttatccatcgtcaaatttaaaacatatttgaacttaacttcagatgatggtgcatccatagcatttttataatttcccaaatacacattattggttacccttgtcattatagtgggagatttggctttgtgcatatctccagttgaacgtagtagtaagtatttatacaaacttttcttatccatttataacgtacaaatggataaaactactttatcggtaaacgcgtgtaatttagaatacgttagagaaaaggctatagtaggcgtacaagcagccaaaacatcaacacttatattctttgttattatattggcaattagtgcgctattactctggtttcagacgtctgataatccagtctttaatgaattaacgagatatatgcgaattaaaaatacggttaacgattggaaatcattaacggatagcaaaacaaaattagaaagtgatagaggtagacttctagccgctggtaaggatgatatatttgaattcaaatgtgtggatttcggcgcctattttatagctatgcgattggataagaaaacatatctgccgcaagctattaggcgaggtactggagacgcgtggatggttaaaaaggcggcaaaggtcgatccatctgctcaacaattttgtcagtatttgataaaacacaagtctaataatgttattacttgtggtaatgagatgttaaatgaattaggttatagcggttattttatgtcaccgcattggtgttccgattttagtaatatggaatagtgttagataaatgcggtaacgaatgttcctgtaaggaaccataacagcttagatttaacgttaaagatgagcataaacataataaacaaaattacaatcaaacttataacattaatatcaaacaatccaaaaaatgaaatcagtggagtagtaaacgcgtacataactcctggataacgtttagcagctgccgttcctattctagaccaaaaattcggtttcatgttttcgaaacggtattctgcaacaagtcgaggatcgtgttctacatatttggcggcattatccagtatctgcctattgatcttcatttcgttttcgattctggctatttcaaaataaaatcccgatgatagacctccagactttataatttcatctacgatgttcagcgccgtagtaactctaataatataggctgataagctaacatcataccctcctgtatatgtgaatatggcatgatttttgtccattacaagctcggttttaactttattgcctgtaataatttctctcatctgtaggatatctatttttttgtcatgcattgccttcaagacgggacgaagaaacgtaatatcctcaataacgttatcgttttctacaataactacatattctacctttttattttctaactcggtaaaaaaattagaatcccatagggctaaatgtctagcgatatttcttttcgtttcctctgtacacatagtgttacaaaaccctgaaaagaagtgagtatacttgtcatcatttctaatgtttcctccagtccactgtataaacgcataatccttgtaatgatctggatcatccttgactaccacaacatttcttttttctggcataacttcgttgtcctttacatcatcgaacttctgatcattaatatgctcatgaacattaggaaatgtttctgatggaggtctatcaataactggcacaacaataacaggagttttcaccgccgccatttagttattgaaattaatcatatacaactctttaatacgagttatattttcgtctatccattgtttcacattgacatatttcgacaaaaagatataaaatgcgtattccaatgcttctctgtttaatgaattactaaaatatacaaacacgtcactgtctggcaataaatgatatcttagaatattgtaacaatttattttgtattgcacatgttcgtgatctatgagttcttcttcgaatggcataggatctccgaatctgaaaacgtataaataggagttagaataataatatttgagagtattggtaatatataaactctttagcggtataattagtttttttctctcaatttctatttttagatgtgatggaaaaatgactaattttgtagcattagtatcatgaactctaatcaaaatcttaatatcttcgtcacacgttagctctttgaagtttttaagagatgcatcagttggttctacagatggagtaggtgcaacaattttttgttctacacatgtatgtactggagccattgttttaactataatggtgcttgtatcgaaaaactttaatgcagatagcggaagctcttcgccgcgactttctacgtcgtaattgggttctaacgccgatctctgaatggatactagttttctaagttctaatgtgattctctgaaaatgtaaatccaattcctccggcattatagatgtgtatacatcggtaaataaaactatagtatccaacgatcccttctcgcaaattctagtcttaaccaaaaaatcgtatataaccacggagatggcgtatttaagagtggattcttctaccgttttgttcttggatgtcatataggaaactataaagtccgcactactgttaagaatgattactaacgcaactatatagtttaaattaagcattttggaaacataaaataactctgtagacgatacttgactttcgaataagtttgcagacaaacgaagaaagaacagacctctcttaatttcagaagaaaactttttttcgtattcctgacgtctagagtttatatcaataagaaagttaagaattagtcggttaatgttgtatttcattacccaagtttgagatttcataatattatcaaaagacatgataatattaaagataaagcgctgactatgaacgaaatagctatatggttcgctcaagaatatagtcttgttaaacgtggaaacgataactgtatttttaatcacgtcagcggcatctaaattaaatataggtatatttattccacacactctacaatatgccacaccatcttcataataaataaattcgttagcaaaattattaattttagtgaaatagttagcgtcaactttcatagcttccttcaatctaatttgatgctcacacggtgcgaattccactctaacatcccttttccatgcctcaggttcatcgatctctataatatctagttttttgcgtttcacaaacacaggctcgtctctcgcgatgagatctgtatagtaactatgtaaatgataactagatagaaagatgtagctatatagatgacgatcctttaagagaggtataataactttaccccaatcagatagactgttgttatggtcttcggaaaaagaatttttataaatttttccagtattttccaaatatacgtacttaacatctaaaaaatccttaatgataataggaatggataatccgtctattttataaagaaatacatatcgcacattatacttttttttggaaatgggaataccgatgtgtctacataaatatgcaaagtctaaatattttttagagaatcttagttggtccaaattcttttccaagtacggtaatagatttttcatattgaacggtatcttcttaatctctggttctagttccgcattaaatgatgaaactaagtcactatttttataactaacgattacatcacctctaacatcatcatttaccagaatactgatcttcttttgtcgtaaatacatgtctaatgtgttaaaaaaaagatcatacaagttatacgtcatttcatctgtggtattcttgtcattgaaggataaactcgtactaatctcttctttaacagcctgttcaaatttatatcctatatacgaaaaaatagcaaccagtgtttgatcatccgcgtcaatattctgttctatcgtagtgtataacaatcgtatatcttcttctgtgatagtcgatacgttataaaggttgataacgaaaatatttttatttcgtgaaataaagtcatcgtaggattttggacttatattcgcgtctagtagatatgcttttatttttggaatgatctcaattagaatagtctctttagagtccatttaaagttacaaacaactaggaaattggtttatgatgtataatttttttagtttttatagattctttattctatacttaaaaaatgaaaataaatacaaaggttcttgagggttgtgttaaattgaaagcgagaaataatcataaattatttcattatcgcgatatccgttaagtttgtatcgtaatggcgtggtcaattacgaataaagcggatactagtagcttcacaaagatggctgaaatcagagctcatctaaaaaatagcgctgaaaataaagataaaaacgaggatattttcccggaagatgtaataattccatctactaagcccaaaaccaaacgagccactactcctcgtaaaccagcggctactaaaagatcaaccaaaaaggaggaagtggaagaagaagtagttatagaggaatatcatcaaacaactgaaaaaaattctccatctcctggagtcagcgacattgtagaaagcgtggccgctgtagagctcgatgatagcgacggggatgatgaacctatggtacaagttgaagctggtaaagtaaatcatagtgctagaagcgatctctctgacctaaaggtggctaccgacaatatcgttaaagatcttaagaaaattattactagaatctctgcagtatcgacggttctagaggatgttcaagcagctggtatctctagacaatttacttctatgactaaagctattacaacactatctgatctagtcaccgagggaaaatctaaagttgttcgtaaaaaagttaaaacttgtaagaagtaaatgcgtgcacttttttataaagatggtaaactctttaccgataataattttttaaatcctgtatcagacgataatccagcgtatgaggttttgcaacatgttaaaattcctactcatttaacagatgtagtagtatatgaacaaacgtgggaggaggcgttaactagattaatttttgtgggaagtgattcaaaaggacgtagacaatacttttacggaaaaatgcatgtacagaatcgcaacgctaaaagagatcgtatttttgttagagtatataacgttatgaaacgaattaattgttttataaacaaaaatataaagaaatcgtccacagattccaattatcagttggcggtttttatgttaatggaaactatgttttttattagatttggtaaaatgaaatatcttaaggagaatgaaacagtagggttattaacactaaaaaataaacacatagaaataagtcccgatgaaatagttatcaagtttgtaggaaaggacaaagtttcacatgaatttgttgttcataagtctaatagactatataaaccgctattgaaactgacggatgattctagtcccgaagaatttctgttcaacaaactaagtgaacgaaaggtatacgaatgtatcaaacagtttggtattagaatcaaggatctccgaacgtatggagtcaattatacgtttttatataatttttggacaaatgtaaagtccatatctcctcttccgtcaccaaaaaagttaatagcattaactatcaaacaaactgctgaagtggtaggtcatactccatcaatttcaaaaagagcttatatggcaacgactattttagaaatggtaaaggataaaaattttttagatgtagtatctaaaactacgttcgatgaattcctatctatagtcgtagatcacgttaaatcatctacggatggatgatatagatctttacacaaataattacaagaccgataaatggaaatggataagcgtatgaaatctctcgcaatgacagctttcttcggagagctaagcacattagatattatggcattgataatgtctatatttaaacgccatccaaacaataccattttttcagtggataaggatggtcagtttatgattgatttcgaatacgataattataaggcttctcaatatttggatctgaccctcactccgatatctggagatgaatgcaagactcacgcatcgagtatagccgaacaattggcgtgtgcggatattattaaagaggatattagcgaatatatcaaaactactccccgtcttaaacgatttataaaaaaataccgcaatagatcagatactcgtatcagtcgagatacagaaaagcttaaaatagctctagctaaaggcatagattacgaatatataaaagacgcttgttaataagtaaatgaaaaaaaactagtcgtttataataaaacacgatatggatgccaacgtagtatcattttctactattgcgacgtatatagacgctttagcgaagaatgcttcggaattagaacagaggtctaccgcatacgaaataaataatgaattggaactagtatttattaagccgccattgattactttgacaaatgtagtgaatatctctacgattcaggaatcgtttattcgatttaccgttactaataaggaaggtgttaaaattagaactaagattccattatctaaggtacatggtctagatgtaaaaaatgtacagttagtagatgctatagataacatagtttgggaaaagaaatcattagtgacggaaaatcgtcttcacaaagaatgcttgttgagactatcgacagaggaacgtcatatatttttggattacaagaaatatggatcctctatccgactagaattagtcaatcttattcaagcaaaaacaaaaaactttacgatagactttaagctaaaatattttctaggatccggtgcccagtctaaaagttctttgttgcacgctattaatcatccaaagtcaaggcctaatacatctctggaaatagaattcacacctagagacaatgaaacagttccatatgatgaactaataaaggaattgacgactctctcgcgtcatatatttatggcttctccagagaatgtaattctttctccgcctattaacgcgcctataaaaacctttatgttgcctaaacaagatatagtaggtttggatctggaaaatctatatgccgtaactaagactgacggcattcctataactatcagagttacatcaaacgggttgtattgttattttacacatcttggttatattattagatatcctgttaagagaataatagattccgaagtagtagtctttggtgaggcagttaaggataagaactggaccgtatatctcattaagctaatagagcctgtgaatgcaatcaatgatagactagaagaaagtaagtatgttgaatctaaactagtggatatttgtgatcggatagtattcaagtcaaagaaatacgaaggtccgtttactacaactagtgaagtcgtcgatatgttatctacatatttaccaaagcaaccagaaggtgttattctgttctattcaaagggacctaaatctaacattgattttaaaattaaaaaggaaaatactatagaccaaactgcaaatgtagtatttaggtacatgtccagtgaaccaattatctttggagaatcgtctatctttgtagagtataagaaatttagcaacgataaaggctttcctaaagaatatggttctggtaagattgtgttatataacggcgttaattatctaaataatatctattgtttggaatatattaatacacataatgaagtgggtattaagtccgtggttgtacctattaagtttatagcagaattcttagttaatggagaaatacttaaacctagaattgataaaaccatgaaatatattaactcagaagattattatggaaatcaacataatatcatagtcgaacatttaagagatcaaagcatcaaaataggagatatctttaacgaggataaactatcggatgtgggacatcaatacgccaataatgataaatttagattaaatccagaagttagttattttacgaataaacgaactagaggaccgttgggaattttatcaaactacgtcaagactcttcttatttctatgtattgttccaaaacatttttagacgattccaacaaacgaaaggtattggcgattgattttggaaacggtgctgacctggaaaaatacttttatggagagattgcgttattggtagcgacggatccggatgctgatgctatagctagaggaaatgaaagatacaacaaattaaactctggaattaaaaccaagtactacaaatttgactacattcaggaaactattcgatccgatacatttgtctctagtgtcagagaagtattctattttggaaagtttaatatcatcgactggcagtttgctatccattattcttttcatccgagacattatgctaccgtcatgaataacttatccgaactaactgcttctggaggcaaggtattaatcactaccatggacggagacaaattatcaaaattaacagataaaaagacttttataattcataagaatttacctagtagcgaaaactatatgtctgtagaaaaaatagctgatgatagaatagtggtatataatccatcaacaatgtctactccaatgactgaatacattatcaaaaagaacgatatagtcagagtgtttaacgaatacggatttgttcttgtagataacgttgatttcgctacaattatagaacgaagtaaaaagtttattaatggcgcatctacaatggaagatagaccgtctacaaaaaactttttcgaactaaatagaggagccattaaatgtgaaggtttagatgtcgaagacttacttagttactatgttgtttatgtcttttctaagcggtaaataataatatggtatgggttctgatctcccagttctaaatgcattaaataattccaatagagcgatttttgttcctataggaccttccaactgtggatactctgtattgttaatagatatattaatacttttgtcgggtaacagaggttctacgtcttctaaaaataaaagttttataacatctggcctgttcataaataaaaacttggcgattctatatatactcttattatcaaatctagccattgtcttatagatgtgagctactgtaggtgtaccatttgattttctttctaatactatatatttctctcgaagaagttcttgcacatcatctgggaataaaatactactgttgagtaaatcagttattttttttatatcgatattgatggacatttttatagttaaggataataagtatcccaaagtcgataacgacgataacgaagtatttatacttttaggaaatcacaatgactttatcagattaaaattaacaaaattaaaggagcatgtatttttttctgaatatattgtgactccagatacatatggatctttatgcgtcgaattaaatgggtctagttttcagcacggcggtagatatatagaggtggaggaatttatagatgctggaagacaagttagatggtgttctacatccaatcatatatctaaagatatacccgaagatatgcacactgataaatttgtcatttatgatatttatacgtttgattcgttcaagaataaacgattggtattcgtacaggtacctccgtcgttaggagatgatagtcatttgactaatccgttattgtcaccgtattatcgtaattcagtagccagacaaatggtcaatgatatgatttttaatcaagattcatttttaaaatatttattagaacatctgattagaagccactatagagtttctaaacatataacaatagttagatacaaggataccgaagaattaaatctaacgagaatatgttataatagagataagtttaaggcgtttgtattcgcttggtttaacggcgtttcggaaaatgaaaaggtactagatacgtataaaaaggtatctaatttgatataatgaattcagtgactgtatcacacgcgccatatactattacttatcacgatgattgggaaccagtaatgagtcaattggtagagttttataacgaagtagccagttggctgctacgagacgagacgtcgcctattcctgataagttctttatacagttgaaacaaccgcttagaaataaacgagtatgtgtgtgtggtatagatccgtatccgaaagatggaactggtgtaccgttcgaatcaccaaattttacaaaaaaatcaattaaggagatagcttcatctatatctagattaaccggagtaattgattataaaggttataaccttaatataatagacggggttataccctggaattattacttaagttgtaaattaggagaaacaaaaagtcacgcgatttactgggataagatttccaagttactgctgcagcatataactaaacacgttagtgttctttattgtttgggtaaaacagatttctcgaatatacgggccaagttagaatccccggtaactaccatagtcggatatcatccagcggctagagaccgccaattcgagaaagatagatcatttgaaattatcaacgttttactggaattagacaacaaggcacctataaattgggctcaagggtttatttattaatgctttagtgaaattttaacttgtgttctaaatggatgcggctattagaggtaatgatgttatctttgttcttaagactataggtgtcccgtcagcgtgcagacaaaatgaagatccaagatttgtagaagcatttaaatgcgacgagttagaaagatatattgagaataatccagaatgtacactattcgaaagtcttagggatgaggaagcatactctatagtcagaattttcatggatgtagatttagacgcgtgtctagacgaaatagattatttaacggccattcaagattttattatcgaggtgtcaaactgtgtagctagattcgcgtttacagaatgcggcgccattcatgaaaatgtaataaaatccatgagatctaatttttcattgactaagtctacaaatagagataaaacaagttttcatattatctttttagatacgtataccactatggatacattgatagctatgaaacgaacactattagaattaagtagatcatctgaaaatccactaaccagatcgatagacactgccgtatataggagaaaaacaactcttcgggttgtaggtactaggaaaaatccaaattgcgacactattcatgtaatgcaaccaccgcatgataatatagaagattacctattcacttacgtggatatgaacaacaatagttattacttttctctacaacaacgattggaggatttagttcctgataagttatgggaaccagggtttatttcattcgaagacgctataaaaagagtttcaaaaatattcattaattctataataaactttaatgatctcgatgaaaataattttacaacggtaccactggtcatagattacgtaacaccttgtgcattatgtaaaaaacgatcgcataaacatccgcatcaactatcgttggaaaatggtgctattagaatttacaaaactggtaatccacatagttgtaaagttaaaattgttccgttggatggtaataaactgtttaatattgcacaaagaattttagacactaactctgttttattaaccgaacgaggagaccatatagtttggattaataattcatggaaatttaacagcgaagaacccttgataacaaaactaattttgtcaataagacatcaactacctaaggaatattcaagcgaattactctgtccaagaaaacgaaagactgtagaagctaacatacgagacatgttagtagattcagtggagaccgatacctatccggataaacttccgtttaaaaatggtgtattggacctggtagacggaatgttttactctggagatgatgctaaaaaatatacgtgtactgtatcaaccggatttaaatttgacgatacaaagttcgtcgaagacagtccagaaatggaagagttaatgaatatcattaacgatatccaaccattaacggatgaaaataagaaaaatagagagctatatgaaaaaacattatctagttgtttatgcggtgctaccaaaggatgtttaacattcttttttggagaaactgcaactggaaagtcgacaaccaaacgtttgttaaagtctgctatcggtgacctgtttgttgagacgggtcaaacaattttaacagatgtattggataaaggacctaatccatttatcgctaacatgcatttgaaaagatctgtattctgtagcgaactacctgattttgcctgtagtggatcaaagaaaattagatctgacaatattaaaaagttgacagaaccttgtgtcattggaagaccgtgtttctccaataaaattaataatagaaaccatgcgacaatcattatcgatactaattacaaacctgtttttgataggatagataacgcattaatgagaagaattgccgtcgtgcgattcagaacacacttttctcaaccttctggtagagaggctgctgaaaataatgacgcgtacgataaagtcaaactattagacgaggggttagatggtaaaatacaaaataatatatatagatttgcatttctatacttgttggtgaaatggtacaaaaaatatcatgttcctattatgaaactatatcctacacccgaagagattcctgactttgcattctatctcaaaataggtactctgttggtatctagctctgtaaagcatattccattaatgacggacctctccaaaaagggatatatattgtacgataatgtggtcactcttccgttgactactttccaacagaaaatatccaagtattttaattctagactatttggacacgatatagagagcttcatcaatagacataagaaatttgccaatgttagtgatgaatatctgcaatatatattcatagaggatatttcatctccgtaaatatatgctcatatatttatagaagatatcacatatctaaatgaataccggaatcatagatttatttgataatcatgttgatagtataccaactatattacctcatcagttagctactctagattatctagttagaactatcatagatgagaacagaagcgtgttattgttccatattatgggatcaggtaaaacaataatcgctttgttgttcgccttggtagcttccagatttaaaaaggtttacattctagtgccgaacatcaacatcttaaaaattttcaattataatatgggtgtagctatgaacttgtttaatgacgaattcatagctgagaatatctttattcattccacaacaagtttttattctcttaattataacgataacgtcattaattataacggattatctcgctacaataactctatttttatcgttgatgaggcacataatatctttgggaataatactggagaacttatgaccgtgataaaaaataaaaacaagattccttttttactattgtctggatctcccattactaacacacctaatactctgggtcatattatagatttaatgtccgaagagacgatagattttggtgaaattattagtcgtggtaagaaagtaattcagacacttcttaacgaacgcggtgtgaatgtacttaaggatttgcttaaaggaagaatatcatattacgaaatgcctgataaagatctaccaacgataagatatcacggacgtaagtttctagatactagagtagtatattgtcacatgtctaaacttcaagagagagattatatgattactagacgacagctatgttatcatgaaatgtttgataaaaatatgtataacgtgtcaatggcagtattgggacaacttaatctgatgaataatttagatactttatttcaggaacaggataaggaattgtacccaaatctgaaaataaataatggcgtgttatacggagaagaattggtaacgttaaacattagttccaaatttaaatactttattaatcggatacagacactcaacggaaaacattttatatacttttctaattctacatatggcggattggtaattaaatatatcatgctcagtaatggatattctgaatataatggttctcagggaactaatccacatatgataaacggcaaaccaaaaacatttgctatcgttactagtaaaatgaaatcgtctttagaggatctattagatgtgtataattctcctgaaaacgatgatggtagtcaattgatgtttttgttttcatcaaacattatgtccgaatcctatactctaaaagaggtaaggcatatttggtttatgactatcccagatactttttctcaatacaaccaaattcttggacgatctattagaaaattctcttacgccgatatttctgaaccagttaatgtatatcttttagccgccgtatattccgatttcaatgacgaagtgacgtcattaaacgattacacacaggatgaattaattaatgttttaccatttgacatcaaaaagctgttgtatctaaaatttaagacgaaagaaacgaatagaatatactctattcttcaagagatgtctgaaacgtattctcttccaccacatccatcaattgtaaaagttttattgggagaattggtcagacaatttttttataataattctcgtattaagtataacgataccaagttacttaaaatggttacatcagttataaaaaataaagaagacgctaggaattacatagatgatattgtaaacggtcacttctttgtatcgaataaagtatttgataaatctcttttatacaaatacgaaaacgatattattacagtaccgtttagactttcctacgaaccatttgtttggggagttaactttcgtaaagaatataacgtggtatcttctccataaaactgatgagatatataaagaaataaatgtcgagctttgttaccaatggatacctttccgttacattggaaccacacgagctgacgttagacataaaaactaatattaggaatgccgtatataagacgtatctccatagagaaattagtggtaaaatggccaagaaaatagaaattcgtgaagacgtggaattacctctcggcgaaatagttaataattctgtagttataaacgttccgtgtgtaataacctacgcgtattatcacgttggggatatagtcagaggaacattaaacatcgaagatgaatcaaatgtaactattcaatgtggagatttaatctgtaaactaagtagagattcgggtactgtatcatttagcgattcaaagtactgcttttttcgaaatggtaatgcgtatgacaatggcagcgaagtcactgccgttctaatggaggctcaacaaggtatcgaatctagttttgtttttctcgcgaatatcgtcgactcataaaaaagagaatagcggtaagtataaacacgaatactatggcaataattgcgaatgttttattctcttcgatatatttttgataatatgaaaaacatgtctctctcaaatcggacaaccatctcataaaatagttctcgcgcgctggagaggtagttgccgctcgtataatctctccagaataatatacttgcgtgtcgtcgttcaatttatacggatttctatagttctctgttatataatgcggtttgccctcatgattagacgacgacaatagtgttctaaatttagatagttgatcagaatgaatgtttattggcgttggaaaaattatccatacagcgtctgcagagtggttgatagttgttcctagatatgtaaaataatccaacttactaggcagcaaattgtctagataaaatactgaatcaaacggtgcagacgtattggcggatctaatggaatccaattgattaactatcttttgaaaatatacatttttatgatccaatacttgtaagaatatagaaataatgataagtccatcatcgtgtttttttgcctcttcataagaactatattttttcttattccaatgaacaagattaatctctccagagtatttgtacacatctatcaagtgattggatccataatcgtcttcctttccccaatatatatgtagtgatgataacacatattcattggggagaaaccctccacttatatatcctcctttaaaattaatccttactagttttccagtgttctggatagtggttggtttcgactcattataatgtatgtctaacggcttcaatcgcgcgttagaaattgcttttttagtttctatattaataggagatagttgttgcggcatagtaaaaatgaaatgataactgtttaaaaatagctcttagtatgggaattacaatggatgaggaagtgatatttgaaactcctagagaattaatatctattaaacgaataaaagatattccaagatcaaaagacacgcatgtgtttgctgcgtgtataacaagtgacggatatccgttaataggagctagaagaacttcattcgcgttccaggcgatattatctcaacaaaattcagattctatctttagagtatccactaaactattacggtttatgtactacaatgaactaagagaaatctttagacggttgagaaaaggttctatcaacaatatcgatcctcactttgaagagttaatattattgggtggtaaactagataaaaaggaatctattaaagattgtttaagaagagaattaaaagaggaaagtgatgaacgtataacagtaaaagaatttggaaatgtaattctaaaacttacaacacgggataaattatttaataaagtatatataagttattgcatggcgtgttttattaatcaatcgttggaggatttatcgcatactagtatttacaatgtagaaattagaaagattaaatcattaaatgattgtattaacgacgataaatacgaatatctgtcttatatttataatatgctagttaatagtaaatgaacttttacagatctagtataattagtcagattattaagtataatagacgactagctaagtctattatttgcgaggatgactctcaaattattacactcacggcattcgttaaccaatgcctatggtgtcataaacgagtatccgtgtccgctattttattaactactgataacaaaatattagtatgtaacagacgagatagttttctctattctgaaataattagaactagaaacatgtttagaaagaaacgattatttctgaattattccaattatttgaacaaacaggaaagaagtatactatcgtcatttttttctctagatccagctactactgataatgatagaatagacgctatttatccgggtggcatacccaaaaggggtgagaatgttccagagtgtttatccagggaaattaaagaagaagttaatatagacaattcttttgtattcatagacactcggttttttattcatggcatcatagaagataccattattaataaattttttgaggtaatcttctttgtcggaagaatatctctaacgagtgatcaaatcattgatacatttaaaagtaatcatgaaatcaaggatctaatatttttagatccgaattcaggtaatggactccaatacgaaattgcaaaatatgctctagatactgcaaaacttaaatgttacggccatagaggatgttattatgaatcattaaaaaaattaactgaggatgattgattaaaaaatataaattaatttaccatcgtgtatttttataacgggattgtccggcatatcatgtagatagttaccgtctacatcgtatactcgaccatctacgcctttaaatcctctatttattgacattaatctattagaattggaataccaaatattagtaccctcaattagtttattggtaatattttttttagacgatagatcgatggctcttgaaaccaaggttttccaaccggactcattgtcgatcggtgagaagtctttttcattagcatgaatccattctaatgatgtatgtttaaacactctaaacaattggacaaattcttttgatttgctttgaatgatttcaaataggtcttcgtctacagtaggcataccattagataatctagccattataaagtgcacgtttacatatctacgttctggaggagtaagaacgtgactattgagacgaatggctcttcctactatctgacgaagagacgcctcgttccatgtcatatctaaaatgaagatatcattaattgagaaaaaactaataccctcgcctccactagaagagaatacgcatgttttaatgcattctccgttagtgtttgattcttggttaaactcagccaccgccttgattctagtatcttttgttctagatgagaactctatattagagataccaaagactttgaaatatagtaataagatttctattcctgactgattaacaaatggttcaaagactagacatttaccatgggatgctaatattcccaaacatacatctataaatttgacgcttttctcttttaattcagtaaatagagagatatcagccgcactagcatcccctttcaatagttctccctttttaaaggtatctaatgcggatttagaaaactctctatctcttaatgaatttttaaaatcattatatagtgttgctatctcttgcgcgtattcgcccggatcacgattttgtctttcaggaaagctatcgaacgtaaacgtagtagccatacgtctcagaattctaaatgatgatatacctgtttttatttcagcgagtttagccttttgataaatttcttcttgctttttcgacatattaacgtatcgcattaatactgttttcttagcgaatgatgcagacccttctacgtcatcaaaaatagaaaactcgttattaactatatacgaacatagtcctcctagtttggagactaattctttttcatcgactagacgtttattctcaaatagcgattggtgttgtaaggatcctggtcgtagtaagttaaccaacatggtgaattcttgcacactattgacgataggtgtagccgataaacaaatcatcttatggttttttaacgcaatggtcttagataaaaaattatatactgaacgagtaggacggatcttaccatcttctttgattaatgatttagaaatgaagttatgacattcatcaataatgacgcatattctactcttggaattaatagttttgatattagtaaaaaatttatttctaaaattttgatcatcgtaattaataaaaatacaatccttcgttatctctggagcgtatctgagtatagtgttcatccaaggatcttctatcaaagcctttttcaccaataagataatagcccaattcgtataaatatccttaagatgtttgagaatatatacagtagtcattgttttaccgacacccgtttcatggaacaataaaagagaatgcatactgtctaatcctaagaaaactcttgctacaaaatgttgataatccttgaggcgtactacgtccgaccccatcatttcaacgggcatattagtagttctgcgtaaggcataatcgatataggccgcgtgtgatttactcatttatgagtgataagtaataactatgttttaaaaatcacagcagtagtttaactagtcttctctgatgtttgttttcgatactttttgaatcagaagtcatactagaataaagcaacgagtgaacgtaatagagagcttcgtatactctattcgaaaactctaagaacttattaatgaattccgtatccactggattgtttaaaatactaaattgaacactgttcacatccttccaagaagaagacttagtgacggacttaacatgagacataaataaatccaaattttttttacaaacatcactagccaccataatggcgctatctttcaaccagctatcgcttacgcattttagcagtctaacatttttaaagagactacaatatattctcatagtatcgattacacctctaccgaataaagttggaagtttaataatacaatatttttcgtttacaaaatcaaataatggtcgaaacacgtcgaaggttaacatcttataatcgctaatgtatagattgttttcagtgagatgattattagatttaatagcatctcgttcacgtttgaacagtttattgcgtgcgctgaggtcggcaactacggcgtccgctttagtactcctcccataatactttacgctattaatctttaaaatttcatagactttatctagatcgctttctggtaacatgatatcatgtgtaaaaagttttaacatgtcggtcggcattctatttagatcattaactctagaaatctgaagaaagtaattagctccgtattccagactaggtaatgggcttttacctagagacagattaagttctggcaatgtttcataaaatggaagaaggacatgcgttccctcccggatattttttacaatttcatccatttacaactctatagtttgttttcattattattagttattatctcccataatcttggtaatacttaccccttgatcgtaagataccttatacaggtcattacatacaactaccaattgtttttgtacataatagattggatggttgacatccatggtggaataaactactcgaacagatagtttatctttccccctagatacattagccgtaatagttgtcggcctaaagaatatctttggtgtaaagttaaaagttagggttcttgttccattattgctttttgtcagtagttcattataaattctcgagatgggtccgttctctgaatatagaacatcatttccaaatctaacttctagtctagaaataatatcggtcttattcttaaaatctattcccttgatgaagggatcgttaatgaacaaatccttggcctttgattcggctgatctattatctccgttatagacgttacgttgactagtccaaagacttacaggaatagatgtatcgatgatgttgatactatgtgatatgtgagcaaagattgttctcttagtggcatcactatatgttccagtaatggcggaaaactttttagaaatgttatatataaaagaattttttcgtgttccaaacattagcagattagtatgaagataaacactcatattatcaggaacattatcaatttttacatacacatcagcatcttgaatagaaacgataccatcttctggaacctctacgatctcggcagactccggataaccagtcggtgggccatcgctaacaataactagatcatccaacaatctactcacatatgcatctatataatctttttcatcttgtgagtaccctggatacgaaataaatttattatccgtatttccataataaggtttagtataaacagagagagatgttgccgcatgaacttcagttacagtcgccgttggttggtttatttgacctattactctcctaggtttctctataaacgatggtttaatttgtacattcttaaccatatatccaataaagctcaattcaggaacataaacaaattctttgttgaacgtttcaaagtcgaacgaagagtcacgaataacgatatcggatactggattgaaggttaccgttacggtaatttttgaatcggatagtttaagactgctgaatgtatcttccacatcaaacggagttttaatataaacgtatactgtagatggttctttaatagtgtcattaggagttaggccaatagaaatatcattaagttcactagaatatccagagtgtttcaaagcaattgtattattgatacaattattatataattcttcgccctcaatttcccaaataacaccgttacacgaagagatagatacgtgattaatacatttatatccaacatatggtacgtaactgaatcttcccatacctttaacttctggaagttccaaactcagaaccaaatgattaagcgcagtaatatactgatccctaatttcgaagctagcgatagcctgattgtctggaccatcgtttgtcataactccggatagagaaatatattgcggcatatacaaagttggaatttgactatcgactgcgaagacattagaccgtttaatagagtcatccccaccgatcaaagaattaatgatagtattattcattttctatttaaaatggaaaaagcttacaataaactccgtagagaaatatctataatttgtgagttttccttaaagtaacagcttccgtaaacgccgtctttatctcttagtaggtttattgtatttatgaccttttccttatcttcatagaatactaaaggcaacaaagaaatttttggttcttctctaagagctacgtgagacttaaccatagaagccaacgaatccctacatattttagaacagaaataccctacttcaccacccttgtatgtctcaatactaataggtctaaaaaccaaatcttgattacaaaaccaacacttatcaattacactatttgtcttaatagacacatctgccatagatttataatactttggtagtatacaagcgagtgcttcttctttagcgggcttaaagactgctttaggtgctgaaataaccacatctggaaggcttactcgcttagccatttaattacggaactatttttttatacttctaatgagcaagtagaaaacctctcatctacaaaaacgtactcgtgtccataatcctctaccatagttacacgttttttagatctcatatgtgctaaaaagttttcccatactaattggttactattatttttcgtataatttttaacagtttgaggttttagatttttagttacagaagtgatatcgaatattttatccaaaaagaatgaataattaattgtcttagaaggagtgttttcttggcaaaagaataccaagtgcttaaatatttctactacttcattaatcttttctgtactcagattcagtttctcatcttttacttgattgattatttcaaagactaacttataatcctttttatttattctctcgttagccttaagaaaactagatacaaaatttgcatctacatcatccgtggatatttgatttttttccatgatatccaagagttccgagataatttctccagaacattgatgagacaataatctccgcaatacatttctcaaatgaataagtttattagacacgtggaagtttgactttttttgtacctttgtacatttttgaaataccgactcgcaaaaaatacaatattcatatccttgttcagatactataccgttatgtctacaaccgctacataatcgtagattcatgttaacactctacgtatctcgtcgtccaatattttatataaaaacattttatttctagacgttgccagaaaatcctgtaatatttttagttttttgggctgtgaataaagtatcgccctaatattgttaccgtcttccgccaatatagtagttaaattatccgcacatgcagaagaacaccgcttaggcggattcagtacaatgttatatttttcgtaccaactcatttaaatatcataatctaaaatagttctgtaatatgtctagcgctaatatattgatcataatcctgtgcataaattaagatacaacaatgtctcgaaatcatcgacatggcttcttccatagttagaagatcgtcgtcaaagttagcaacgtgattcatcaacatttgctgttttgaggcagcaaatactgaaccgtcgccattcaaccattcataaaaaccatcgtctgaatccattgataatttcttgtactggtttttgagagctcgcatcaatctagcatttctagctcccggattgaaaacagaaagaggatcgtacatccagggtccattttctgtaaatagaatcgtataatgtcccttcaagaagatatcagacgatccacaatcaaagaattggtctccgagtttgtaacaaactgcggactttaacctatacatgataccgtttagcataatttctggtgatacgtcaatcggagtatcatctattagagatctaaagccggtgtaacattctccaccaaacatattcttattctgacgtcgttctacataaaacatcattgctccattaacgataacaggggaatgaacagcactacccatcacattagttcccaatggatcaatgtgtgtaactccagaacatcttccatagcctatgttaggaggagcgaacaccactcttccactattgccatcgaatgccatagaataaatatccttggaattgatagaaatcggactgtcggatgttgtgatcatcttcataggattaacaactatgtatggtgccgcctgaagtttcatatcgtaactgatgccgtttataggtctagccacagaaaccaacgtaggtctaaatccaactatagacaaaatagaagccaatatctgttcctcatctgtcataacttgagagcatccagtatgaataatcttcattagatggggatctaccgcatcatcatcgttacaataaaaaattcccattctaatgttcataattgcttttctaatcatggtatgcatgtttgctctctgaatctctgtggaaattagatctgatacacctgtaatcactatcggattatcctccgtaagacgattaaccaacaacatataattataagactttacttttctaaattcataaagttgctggattaggctataggtgtctccatgtacatacgcgttctcgagcgcaggaagtttaataccgaatagtgccatcagaataggatgaatatagtaattagtttctggttttctataaataaaagacaaatcttgtgaactagacatatcggtaaaatgcatggattggaatcgtgtagtcgacagaagaatatgatgattagatggagagtatattttatctaactctttgagttggtcaccgattctaggactagctcgagaatgaataagtactaaaggatgagtacatttcacagaaacactagcattgttcaatgtgctctttacatgggtaaggagttgaaatagctcgtttctatttgttctgacaatatttagtttattcataatgttaagcatatcctgaatagtaaagttagatgtgtcatacttgttagtagttagatatttagcaattgcattcccatcatttctcaatctcgtactccaatcatgcgtggatgctacttcgtcgatggaaaccatacaatcctttttgataggctgttgagattgatcatttcctgcacgtttaggtttggtacgttgatttctagcccctgcggatataaagtcatcgtctacaatttgggacaatgaattgcatacactacaagacaaagatttatcagaagtgtgaatatgatcttcatctaccaaagaaagagtttgattagtataactagattttagtcctgcgttagatgttaaaaaaacatcgctattgaccacggcttccattatttatattcgtagtttttactcgaaagcgtgattttaatatccaatcttattacttttggaatcgttcaaaacctttgactagttgtagaatttgatctattgccctacgcgtatactcccttgcatcatatacgttcgtcaccagatcgtttgtttcggcctgaagttggtgcatatctctttcaacattcgacatgagatccttaagggccatatcgtctagattttgttgagatgctgctcctggatttggattttgttgtgctgttgtacatactgtaccaccagtaggtgtaggagtacatacagtggccacaataggaggttgagaaagtgtaaccgttggagtagtacaagaaatacttccatccgattgttgtgtacatgtagttgttggtaacgtctgagaaggttgggtagatggcggcgtcgtcgttttttgatctttattaaatttagagataatatcctgaacagcattgctcggcgtcaacgctggaaggagtgaactcgccggcgcatcagtatcttcagacagccaatcaaaaagattagacatatcagatgatgtattagtttgttgtcgtggttttggtgtaggagcagtactactaggtagaagaataggagccgatgtagctgttggaaccggctgtggagttatatgaatagttggttgtagcggttggataggctgtctgctggcggccatcatattatctctagctagttgttctcgcaactgtctttgataatacgactcttgagactttagtcctatttcaatcgcttcatcctttttcgtatccggatccttttcttcagaataatagattgacgactttggtgtagaggattctgccagcctctgtgagaacttgttaaagaagtccatttaaggctttaaaattgaattgcgattataagattaaatggcagacacagacgatattatcgactatgaatccgatgatctcaccgaatacgaggatgatgaagaagaggaagaagatggagagtcactagaaactagtgatatagatcccaaatcttcttataagattgtagaatcagcatccactcatatagaagatgcgcattccaatcttaaacatatagggaatcatatatctgctcttaaacgacgctatactagacgtataagtctatttgaaatagcgggtataatagcagaaagctataacttgcttcaacgaggaagattacctctagtttcagaattttctgacgaaacgatgaagcaaaatatgctacatgtaattatacaagagatagaggagggttcttgtcctatagtcatcgaaaagaacggagaattgttgtcggtaaacgattttgacaaagatggtctaaaattccatctagactatattatcaaaatttggaaacttcaaaaacgatattagaatttatacgaatatcgttctctaaatgtcacaatcaagtctcgcatgttcagcaatttattgtcgtactttatatcgtgttcattaacgatatcttgcaaaatagtaatgattctatcttccttcgatagatattcttcagagattattgtcttatattctttcttgttatcagatatgaatttgataagactttgaacattattgatacccgtctgtttaattttttctacagatattttagttttggcagattctatcgtatctgtcaatagacatccaacatcgacattcgacgtcaattgtctataaatcaacgtataaattttagaaataacattagcgaattgttgtgcgttgatgtcgttattctgaaacagtatgattttaggtagcattttcttaacaaagagaacgtatttattgttactcagttgaacagatgatatatccagattactaacgcatctgattccgtataccaaactttcagaagaaatggtatacaattgtttgtattcattcaatgtctctttttcagaaattagtttagagtcgaatactgcaataattttcaagagatagttttcatcagataagattttatttagtgtagatatgataaaactattgttttgttggagaacttgatacgccgcgttctctgtagtcgacgctctcaaatgggaaacaatctccattatttttttggaatcggatactatatcttcggtatcttgacgcagtctagtatacatagagttaagagagattagagtttgtacattaagcaacatgtctctaaatgtggctacaaacttttcctttttcacatcatctagtttattatataccgatttcacaacggcaccagatttaaggaaccagaatgaaaaactctgataactacaatatttcatcatagttacgattttatcatcttctatagttggtgtaatagcgcatacctttttctccaagactggaaccaacgtcataaaaatgtttaaatcaaaatccatatcaacatctgatgcgctaagaccagtctcgcgttcaagattatctttactaatggtgacgaactcatcgtataaaactctaagtttgtccattatttatttacagatttagttgtttaatttatttgtgctcttccagagttgggatagtatttttctaacgtcggtattatattattaggatctacgttcatatgtatcataatattaatcatccacgttttgataaatctatctttagcttctgaaataacgtatttaaacaaaggagaaaaatatttagctacggcatcagacgcaataacattttttgtaaatgtaacgtatttagacgacagatcttcgttaaaaagttttccatctatgtagaatccatcggttgttaacaccattcccgcgtcagattgaataggagtttgaatagtttgttttggaaatagatccttcaataacttatagttgggtgggaaaaaatcgattttatcactagactctttcttttttactatcattacctcatgaactatttcttgaatgagtatatgtattttctttcctatatcggacgcgttcattggaaaatataccatgtcgttaactataagaatatttttatcctcgtttacaaactgaataatatcagatgtagttcgtaaacgaactatatcatcaccagcacaacatctaactatatgatatccactagtttcctttagccgtttattatcttgttccatattagcagtcattccatcatttaagaaggcgtcaaaaataatagggagaaatgacattttggattctgttacaactttaccaaaattaaggatatacggacttactatctttttctcaacgtcaatttgatgaacacacgatgaaaatgtgcttctatgagattgatcatgtagaaaacaacaagggatacaatatttccgcatatcatgaaatatattaagaaatcccaccttattatatttccccaaaggatccatgcacgtaaacattatgccgttatcattaataaagacttctttctcatcggatctgtaaaagttgttactgatttttttcattccaggatctagataattaataatgatgggttttctattcttattctttgtattttggcatatcctagaccagtaaacagtttccactttggtaaaatcagcagacttttgaacgctattaaacatggcattaatggcaataactaaaaatgtaaaatatttttctatgttaggaatatggtttttcactttaatagatatatggtttttggccaaaatgatagatatttttttatccgaggatagtaaaatattattagtcgccgtctctataaaaatgaagctagtctcgatatccaattttattctagaattgataggagtcgccaaatgtaccttatacgttatatctcccttgatgcgttccatttgtgtatctatatcggacacaagatctgtaaatagttttacgttattaatcatcacggtatcgccgtcgctagataacgctaatgtaccatccaagtcccaaatggagagatttaactgttcatcgtttagaataaaatgattaccggtcatattaataaagtgttcatcgtatctagataacaacgacttataattaatgtccaagtcttgaactcgctgaatgatcttttttaacccagttagttttagattggtacgaaatatattgttaaactttgattctacagtaatgtccaaatctagttgtggaaatacttccatcaacattgtttcaaacttgataatattattatctacatcttcgtacgatccaaattccggaatagatgtatcgcacgctctggccacccagataaccaaaaagtcacacgctccaggatatacattgtataaaaagctatcgttttttagtagggtttttttctgcgtgtatacgaagggattaaaaatagtattatcaacgtaactatattccaaattattcttatgagaatagataataatatcgtccttaatatctaacaaatttcctaaatatccctttaattgagtcattcgaagcgtcaatagaatatgtctcttaactatttccggctgttgtatatttaaatgacttcgtaaaaaataatatatgggcgacttctcatctatgtaatcatatggagtgagatatagggctcgttctacctcctgccccttacccacctgtaataccaattgcggacttactatatatcgcatatttatatcgtggggtaaagtgaaaatctactaccgatgatgtaagtcttacaatgttcgaaccagtaccagatcttaatttggaggcctccgtagaactaggggaggtaaatatagatcaaacaacacctatgataaaggagaatagcggttttatatcccgcagtagacgtctattcgcccatagatctaaggatgatgagagaaaactagcactacgattctttttacaaagactttattttttagatcatagagagattcattatttgttcagatgcgttgacgctgtaaaagacgtcactattaccaaaaaaaataacattatcgtggcgccttatatagcacttttaactatcgcatcaaaaggatgcaaacttacagaaacaatgattgaagcattctttccagaactatataatgaacatagtaagaaatttaaattcaactctcaagtatccatcatccaagaaaaactcggataccagtttggaaactatcacgtttatgattttgaaccgtattactctacagtagctctggctattcgagatgaacattcatctggcatttttaatatccgtcaagagagttatctggtaagttcattatctgaaataacatatagattttatctaattaatctaaaatctgatcttgttcaatggagtgctagtacgggcgctgtaattaatcaaatggtaaatactgtattgattacagtgtatgaaaagttacaactggtcatagaaaatgattcacaatttacatgttcattggctgtggaatcaaaacttccaataaaattacttaaagatagaaatgaattatttacaaaattcattaacgagttaaaaaagaccagttcattcaagataagcaaacgcgataaggatacgctactaaaatattttacttaggactggagttagaatttatagacgactcatttcgtttatcattgttactattattactattactatcattattagtgttggcattattagtattcttcttgtcatcttgttcagaaatatacagcaatgctatacctaatactaaatacattatcatgctcgcaatggctctaacaacaacgaaccaaaatgaatttggtcgtagcttttgttcacaaaaatacataaagaaatgtctacataaatctatggcgccattggctacttgaaatagcgccagtcctcctacagattttaatatagctgtataacatgacatttattcatcatcaaaagagacagagtcaccatctgtcatatttagattttttttcatgtgttcaaagtatcctctactcatttcattataatagtttatcatacttagaattttaggacggatcaatgagtaagacttgactagatcgtcagtagtaatttgtgcatcgtctattctgcatccgcttcgtcgaataatgtatagcatcgctttgagattctccatagctatcaagtctttatacaatgacatggaaatatctgtgaatactttatacttctccaacatcgatgccttaacatcatcgcctactttagcattgaaaatacgttctattgtgtagatggatgtagcaagatttttaaacaacaatgccatcttacacgatgattgcctcaagtctccaatcgtttgtttagaacgattagctacagagtccaatgcttggctgactagcatattattatctttagaaattgtattcttcaatgaggcgtttatcatatctgtgatttcgttagtcatattacagtctgactgggttgtaatgttatccaacatatcacctatggatacggtacacgtaccagcatttgtaataatcctatctaagatgttgtatggcattgcgcagaaaatatcttctcctgtaatatctccactctcgataaatctactcagattattcttaaatgccttattctctggagaaaagatatcagtgtccatcatttcattaatagtatacgcagaaaagataccacgagtatcaattctatccaagatacttatcggttccgagtcacagataatggtttcctctccttcgggagatcctgcatagaaatatctaggacaatagtttctatactgtctgtaactctgataatctctaaagtcactaactgataccatgaaattgagaagatcaaacgctgaagtaattaatttttctgcctcgtttttactacaactagttttcatcaatgtagtgacgatgtattgtttagttacttttggtctaatactgatgatagagatattattgcttcccataatggatcttctagtagtcaccttaaagcccattgatgcgaatagcagatagataaagtcttggtatgactcctttctaatatagtacggactacctttgtcacccaactttatacccacataagccataacaacctctttaatagccgtttcatgaggtttatcagccatgagcctgagtagttggaagaatctcatgaatcccgtctcagaaagtcctatatgcatgatagatttatctttcctgggaaactctcgtatagtcatagatgaaatactctttaaagtttctgaaataagattagtaacagtcttacctccgactactctaggtaacaaacaaactctaataggtgttttctctgcggagataatatcagaaaggatagagcaataagtagtattattgtgattataaagaccgaatacataacaggtagaatttataaacatcatgtcctgaaggtttttagacttgtattcctcgtaatccataccgtcccaaaacatggatttggtaactttgatagccgtagatctttgttccttcgccaacaggttaaagaaattaataaagaatttgttgtttctatttatgtccacaaattgcacgtttggaagcgccacggttacattcactgcagcattttgaggatcgcgagtatgaagtacgatgttattgtttactggtatatctggaaagaaatctaccagtctaggaataagagattgatatcgcatagaaatagtaaagtttataatctcatcatcgaagagcattttgttaccattgtaataaatatccactctgtcatatgtataaatgaagtactgttcaaacatgatgagatgtttatatgttggcatagtagtgagatcgacgtttggtaatggcaatgtattaagattaactccataatgtctagcagcatctgcgatgttataagcgtcgtcaaagcggggtcgatcttgtattgttatatattgtctaacacctataagattatcaaaatcttgtctgcttaatacaccgttaacaatttttgccttgaattcttttattggtgcattaataacatccttatagaggatgttaaacaaataagtgttatcaaagttaagatctggatatttcttttctgctagaacatccattgagtcggagccatctggtttaatataaccaccgataaatctagctctgtattctgtatccgtcaatctaatattaagaaggtgttgagtgaaaggtggaagatcgtaaaagctgtgagtattaatgataggattagtttccgaactaatgttaattggggtattaataatatctatatttccagcgttaagtgtaacattaaacagttttaattcacgtgacgtggtatcaattaaataattaatgcccaatttggatatagcagcctgaagctcatcttgtttagttacggatcctaatgagttattaagcaatatatcgaacggatgaacgaaggttgttttaagttggtcacatactttgtaatctagacatagatgcggaagaacggtagaaactatacgaaataaatattcagagtcctctaattgatcaagagtaactattgacttaataggcatcatttatttagtattaaatgacgaccgtaccagtgacggatatacaaaacgatttaattacagagttttcagaagataattatccatctaacaaaaattatgaaataactcttcgtcaaatgtctattctaactcacgttaacaacgtggtagatagagaacataatgccgccgtagtgtcatctccagaggaaatatcctcacaacttaatgaagatctatttccagatgatgattcaccggccactattatcgaacgagtacaacctcatactactattattgacgatactccacctcctacgtttcgtagagagttattaatatcggaacaacgtcaacaacgagaaaaaagatttaatattacagtatcgaaaaatgctgaagcaataatggaatctagatctatgataacttctatgccaacacaaacaccatccttgggagtagtttatgataaagataaaagaattcagatgttagaggatgaagtggttaatcttagaaatcaacgatctaatacaaaatcatctgataatttagataattttaccaaaatactatttggtaagactccgtacaaatcaacagaagttaataagcgtatagccatcgttaattatgcaaatttgaacgggtcccccttatcagtcgaggacttggatgtttgttcggaggatgaaatagatagaatctataaaacgattaaacaatatcacgaaagtagaaaacgaaaaattatcgtcactaacgtgattattattgtcataaacattatcgagcaggcattgctaaaactcggatttgaagaaatcaaaggactgagtaccgatatcacttcagaaattatcgatgtggagatcggagatgactgcgatgctgtagcatctaaactaggaatcggtaacagtccggttcttaatattgtattgtttatactcaagatattcgttaaacgaattaaaattatttaatttaatacattcccatatccagacaacaatcgtctggattaatctgttcctgtcgtctcataccggacgacatattaatctttttattagtgggcatctttttagatggtttctttttcccagcattaactgagtcgatacctagaagatcgtgattgatctctccgaccattccacgaacttctaattggccgtctctgacggtaccataaactattttaccagcattagtaacagcttggacaatctgaccatccatcgcattgtacgatgtagtagtaactgttgttctacgtctaggagcaccagaagtatttttggagcccttggatgttgatgtagaagaagacgaggattttgattttggtttacatgtaatacattttgaactctttgattttgtatcacatgcgccggcagtcacatctgtttgagaattaagattattgttgcctcctttgacggctgcatctccaccgatttgcgctagtagatttttaagctgtggtgtaatcttattaactgtttcgatataatcatcgtaactgcttctaacggctaaattttttttatccgccatttagaagctaaaaatatttttatttatgcagaagatttaactagattatacaatgaactaatatgatccttttccagattatttacaaacttggtattttttggttctggaggaggcgaatttaaattcggacttggattcggattttgtaagttcttgatcttattatacatcgagtataggatggcgacagtaactgctacacaaataccgatcaaaagaagaataccaatcatttattgacaataacttcactattgatcaagtatgcaatatatcatcttttcactaaataagtagtaataatgattcaacaatgtcgagatatatggacgataataatttagttcatggaaatatcgctatgattggtgtgaatgactccgctaactctgtggggtgcgcagtgctttccccacatagaataaattagcattccgactgtgataataataccaagtataaacgccataatactcaatactttccatgtacgagtgggactggtagacttactaaagtcaataaaggcgaagatacacgaaagaatcaaaagaatgattccagcgattagcacgccggaaaaataatttccaatcataagcatcatgtccatttaactaataaaaattttaaatcgccgaatgaacaaagtggaatataaaccatataaaaacaatagtttgtactgcaaaaataatatctatttttgttttcgaagatatggtaaaattaaatagtagtacacagcatgttataactaacagcagcaacggctcgtaattacttatcatttactagacgaaaaggtggtgggatattttcttgctcaaataatacgaatatatcacccatccattttatgcgatgtttatatactctaatctttaatagatctatagacgacgggtttaccaacaatatagattttatcgattcatctaatttaaacccttccttaaacgtgaatgatctattatctggcataacgatgaccctacctgatgaatcggacaatgtactgggccatgtagaataaattatcaacgaattatcgtctacgaacatttatatcatttgttttaattttaggacgcgaataaatggatataaaatagaaaataacagatattacaaccagtgttatggccgcgcccaaccaggtaggcagttttattttatcttttactacaggttctcctggatgtacgtcaccaacggcggacgtagttctagtacaattagacgtaagttccgcttgggaattttttaacgctaaagagttaacgttaatcgtgcacccaacgtatttacatctagttcgttgaacatcttgattataatataaccattttctatctctagattcgtcagtgcactcatgtaaccaacataccctaggtcctaaatatttatctccggaattagattttggataattcgcgcaccaacaatttctatttcctttatgatcgttacaaaagacgtataatgccgtatccccaaaagtaaaataatcaggacgaataattctaataaactcagaacaatatctcgcatccatatgtttggagcaaatatcggaataagtagacatagccggtttccgttttgcacgtaaccattctaaacaattggggtttccaggatcgtttctacaaaatccagtcatgaaatcgtcacaatgttctgtcttgtaattattattaaatatttttggacagtgtttggtatttgtcttagaacaacattttgccacgctatcactatcgcccaggagataatccttttttataaaatgacatcgttgcccggatgctatataatcagtagcgtgttttaaatccttaatatattcaggagttacctcgttctgataatagattaatgatccaggacgaaatttgaaagaactacatggttctccatgaattaatacatattgtttagcaaattcaggaactataaaactactacaatgatctatcgacataccatctatcaaacaaaacttgggtttaatttctcccggagatgtttcataatagtacgtataactttcttctgcaaacttaacagctctattatattcaggataattaaaacctaattccatatatttgtctcgtatatctgctattcctggtgctattttgattctattaagagtaacagctgcccccattcttaataatcgtcagtatttaaactgttaaatgttggtatatcaacatctaccttatttcccgcagtataaggtttgttgcaggtatactgttcaggaatggttacatttatacttcttctatagtcctgtctttcgatgttcatcacatatgcaaagaacagaataaacaaaataatgtaagaaataatattaaatatctgtgaattcgtaaatacattgattgccataataattacagcagctacaatacacacaatagacattcccacagtgttgccattacctccacgatacatttgagttactaagcaataggtaataactaagctagtaagaggcaatagaaaagatgagataaatatcatcaatatagagattagaggagggctatatagagccaagacgaacaaaatcaaaccgagtaacgttctaacatcattatttttgaagattcccaaataatcattcattcctccataatcgttttgcatcatacctccatctttaggcataaacgattgctgctgttcctctgtaaataaatctttatcaagcactccagcacccgcagagaagtcgtcaagcatattgtaatatcttaaataactcatttatatattaaaaaatgtcactattaaagatggagtataatctttatgccgaactaaaaaaaatgacttgtggtcaacccctaagtctttttaacgaagacggggatttcgtagaagttgaaccgggatcatcctttaagtttctgatacctaagggattttacgcctctccttccgtaaagacgagtctagtattcgagacattaacaacgaccgataataaaatcactagtatcaatccaacaaatgcgccaaagttatatcctcttcaacgcaaagtcgtatctgaagtagtttctaatatgaggaaaatgatcgaatcaaaacgtcctctatacatcactcttcacttggcgtgtggatttggtaagactattaccacgtgttatcttatggctacacacggtagaaaaaccgtcatttgcgtacccaataaaatgttaatacatcaatggaagacacaggtagaggcagtcggattggaacataagatatccatagatggagtaagtagtctattaaaggaactaaagactcaaagtccggatgtattaatagtagtcagtagacatctgacaaacgatgccttttgtaaatatatcaataagcattatgatttgttcatcttggatgaatcacatacgtataatctgatgaacaatacagcagttacaagatttttagcgtattatcctccgatgatgtgttattttttaactgctacacctagaccatctaaccgaatttattgtaacagtattattaatattgccaagttatccaatctaaaaaaaactatctatgcagtagatagtttttttgagccatattccacagataatattagacatatggtaaaacgactagatggaccatctaataaatatcatatatataccgagaagttattatctgtagacgagcctagaaatcaacttattcttgataccctggtagaagaattcaagtcaggaactattaatcgcattttagttattactaaactacgtgaacatatggtattattctacaaacgattattagattttttcggaccagaggttgtatttataggagacgcccaaaatagacgtactccagatatggtcaaatcaatcaaggaactaaatagatttatattcgtatccaccttattttattccggtactggtttagatattcctagtttggattcgttgttcatttgctcggcagtaatcaacaatatgcaaatagagcaattactagggagggtatgtcgagaaacagaactattagataggacggtatatgtatttcctaacacatccatcaaagaaataaagtacatgataggaaatttcatgcaacgaattattagtctgtctgtagataaactaggatttaaacaaaaaagttatcggaaacatcaagaatccgatcccacttctgcatgtacaacatcatccagagaagaacgtgtattaaatagaatatttaactcgcaaaatcgttaagaagtttaagcgacgatccgcatgctgcgcaggccagtgtattacccctcatagtattaatataatccaatgatacttttgtgatgtcggaaatcttaaccaatttagactgacaggcagaacacgtcatgcaatcatcatcgtcatcgataactgtagtcttgggcttctttttgcgactcttcattccggaacgcacattggtgctatccatttaggtagtaaaaaataagtcagaatatgccctataacacgatcgtgcaaaacctggtatatcgtctctatctttatcacaatatagtgtatcgacatttttattattattgacctcgtttatcttggaacatggaatgggaacatttttgttatcaacggccatctttgccttaattccagatgttgtaaaattataactaaacagtctatcatcgacacaaatgaaattcttgtttagacgtttgtagtttacgtatgcggctcgttcgcgtctcattttttcagatattgcaggtactataatattaaaaataagaatgaaataacataggattaaaaataaagttatcatgacttctagcgctgatttaactaacttaaaagaattacttagtctgtacaaaagtttgagattttcagattctgcggctatagaaaagtataattctttggtagaatggggaacatctacttactggaaaataggcgtgcaaaaggtagctaatgtcgagacgtcaatatctgattattatgatgaggtaaaaaataaaccgtttaatattgatccgggctattacattttcttaccggtatattttgggagcgtctttatttattcgaagggtaaaaatatggtagaacttggatctggaaactcttttcaaataccagatgatatgcgaagtgcgtgtaacaaagtattagacagcgataacggaatagactttctgagatttgttttgttaaacaatagatggataatggaagatgctatatcaaaatatcagtctccagttaatatatttaaactagctagtgagtacggattaaacatacccaaatatttagaaattgaaatagaggaagacacattatttgacgacgagttatactctattatagaacgctctttcgatgataaatttccaaaaatatccatatcgtatattaagttgggagaacttagacggcaagttgtagactttttcaaattctcattcatgtatattgagtccatcaaggtagatcgtataggagataatatttttattcctagcgttataacaaaatcaggaaaaaagatattagtaaaagatgtagaccatttaatacgatccaaggttagagaacatacatttgtaaaagtaaaaaagaaaaacacattttccattttatacgactatgatggaaacggaacagaaactagaggagaagtaataaaacgaattatagacactataggacgagactattatgttaacggaaagtatttctctaaggttggtagtgcaggcttaaagcaattgactaataaattagatattaatgagtgcgcaactgtcgatgagttagttgatgagattaataaatccggaactgtaaaacgaaaaataaaaaaccaatcagcatttgatttaagcagagaatgtttgggatatccagaagcggattttataacgttagttaataacatgcggttcaaaatagaaaattgtaaggttgtaaatttcaatattgaaaatactaattgtttaaataacccgagtattgaaactatatatggaaactttaaccagttcgtctcaatctttaatgtcgtcaccgatgtcaaaaaaagattattcgagtgaaataatatgcgcctttgatataggtgcaaaaaatcctgccagaactgttttagaagtcaaggataactccgttagggtattggatatatcaaaattagactggagttctgattgggaaaggcgcatagctaaagatttgtcacaatatgaatacactacagttcttctagaacgtcagcctagaaggtcgccgtatgttaaatttatctattttattaaaggctttttatatcatacatcggctgccaaagttatttgcgtctcgcctgtcatgtctggtaattcatatagagatcgaaaaaagagatcggtcgaagcatttcttgattggatggacacattcggattgcgagactccgttccggatagacgcaaattagacgatgtagcggatagtttcaatttggctatgagatacgtattagataaatggaatactaattatacaccttataataggtgtaaatctagaaattacataaaaaaaatgtaataacgttagtaacgccattatggataatctatttacctttctacatgaaatagaagatagatatgccagaactatttttaactttcatctaataagttgcgatgaaataggagatatatatggtcttatgaaagaacgcatttcctcagaggatatgtttgataatatagtgtataataaagatatacatcctgccattaagaaactagtgtattgcgacatccaacttactaaacacattattaatcagaatacgtatccggtatttaacgattcttcacaagtgaaatgttgtcattatttcgacataaactcagataatagcaatattagctctcgtacagtagagatatttgagagggaaaagtcatctcttgtatcatatattaaaactaccaataagaagagaaaggtcaattacggcgaaataaagaaaactgttcatggaggcactaatgcaaattacttttccggtaaaaagtctgacgagtatctgagtactacagttagatccaacattaatcaaccttggatcaaaaccatctctaagaggatgagagttgatatcattaatcactctatagtaacgcgtggaaaaagctctatattacaaactatagaaattatttttactaatagaacatgtgtgaaaatattcaaggattctactatgcacattattctatccaaggacaaggatgaaaaggggtgtatacacatgattgacaaattattctatgtctattataatttatttctgttgttcgaagatatcatccaaaacgagtactttaaagaagtagctaatgttgtaaaccacgtactcacggctacggcattagatgagaaattattcctaattaagaaaatggctgaacacgatgtttatggagttagcaatttcaaaatagggatgtttaacctgacatttattaagtcgttggatcataccgttttcccctctctgttagatgaggatagcaaaataaagttttttaaggggaaaaagctcaatattgtagcattacgatctctggaggattgtataaattacgtgactaaatccgagaatatgatagaaatgatgaaggaaagatcgactattttaaatagcatagatatagaaacggaatcggtagatcgtctaaaagaattgcttctaaaatgaaaaaaaacactaattcagaaatggatcaacgactagggtataagtttttggtgcctgatcctaaagccggagttttttatagaccgttacatttccaatatgtatcgtattctaattttatattgcatcgattgcatgaaatcttgaccgtcaagcggccactcttatcgtttaagaataatacagaacgaattatgatagaaattagcaatgttaaagtgactcctccagattactcacctataatcgcgagtattaaaggtaagagttatgacgcattagccacgttcactgtaaatatctttaaagaggtaatgaccaaagagggtatatccatcactaaaataagtagttatgagggaaaagattctcatttgataaaaattccgctactaataggatacgggaataaaaatccacttgatacagccaagtatcttgttcctaatgtcataggtggagtctttatcaataaacaatctgtcgaaaaagtaggaattaatctagtagaaaagattacaacatggccaaaatttagggttgttaagccaaactcattcactttctcgttttcctccgtatcccctcctaatgtattaccgacaagatatcgccattacaagatatctctggatatatcacaattggaagcgttgaatatatcatcgacaaagacatttataacggtcaatattgttttgctgtctcaatatttatctagagtgagtctagaattcattagacgtagtttatcatacgatatgcctccagaagttgtctatctagtaaacgcgataatagatagtgctaaacgaattactgaatctattactgactttaatattgatacatacattaatgacctggtggaagctgaacacattaaacaaaaatctcagttaacgatcaacgagttcaaatatgaaatgctgcataactttttacctcatatgaactatacacccgatcaactaaagggattttatatgatatctttactaagaaagtttctctactgtatcttccacacttctagatatccagatagagattcgatggtttgtcatcgcatcctaacgtacggcaaatattttgagacgttggcacatgatgaattagagaattacataggcaacatccgaaacgatatcatgaacaatcacaagaacagaggcacttacgcggtaaacattcatgtactaacaactcccggacttaatcacgcgttttctagcttattgagtggaaagttcaaaaagtcagacggtagttatcgaacacatcctcactattcatggatgcagaatatttctattcctaggagtgttggattttatccggatcaagtaaagatttcaaagatgttttctgtcagaaaataccatccaagtcaatatctttacttttgttcatcagacgttccggaaagaggtcctcaggtaggtttagtatctcaattgtctgtcttgagttccattacaaatatactaacgtctgagtatttggatttggaaaagaaaatttgtgagtatatcagatcatattataaagatgatataagttactttgaaacaggatttccaatcactatagaaaatgctctagtcgcatctcttaatccaaatatgatatgtgattttgtaactgactttagacgtagaaaacggatgggattcttcggtaacttggaggtaggtattactttagttagggatcacatgaatgaaattcgcattaatattggagcgggaagattagtcagaccattcttggttgtggataacggagagctcatgatggatgtgtgtccggagttagaaagcagattagacgacatgacattctctgacattcagaaagagtttccgcatgtcatcgaaatggtagatatagaacaatttacttttagtaacgtatgtgaatcggttcaaaaatttagaatgatgtcaaaggatgaaagaaagcaatacgatttatgtgactttcctgccgaatttagagatggatatgtagcatcttcattagtgggaatcaatcacaattctggacccagagctattcttggatgtgctcaagctaaacaagctatctcttgtctgagctcggatatacgaaataaaatagacaatggaattcatttgatgtatccagagaggccaatcgtgattagtaaggctttagaaacttcaaagattgcggctaattgcttcggccaacatgttactatagcattaatgtcgtacaaaggtatcaatcaagaggatggaattatcatcaaaaaacaatttattcagagaggcggtctcgatattgttacagccaagaaacatcaagtagaaattccattggaaaactttaataacaaagaaagagataggtctaacgcctattcaaaattagaaagtaatggattagttagactgaatgctttcttggaatccggagacgctatggcacgaaatatctcatcaagaactcttgaagatgattttgctagagataatcagattagcttcgatgtttccgagaaatataccgatatgtacaaatctcgcgttgaacgagtacaagtagaacttactgacaaagttaaggtacgagtattaaccatgaaagaaagaagacccattctaggagacaaatttaccactagaacgagtcaaaagggaacagtcgcgtatgtcgcggatgaaacggaacttccatacgacgaaaatggtatcacaccagatgtcattattaattctacatccatcttctctagaaaaactatatctatgttgatagaagttattttaacagccgcatattctgctaagccgtacaacaataagggagaaaaccgacctgtctgttttcctagtagtaacgaaacatccatcgatacatatatgcaattcgctaaacaatgttatgagcattcaaatccgaaattgtccgatgaagaattatcggataaaatcttttgtgaaaagattctctatgatcctgaaacggataagccttatgcatccaaagtattttttggaccaatttattacttgcgtctgaggcatttaactcaggacaaggcaaccgttagatgtagaggtaaaaagacgaagctcattagacaggcgaatgagggacgaaaacgtggaggaggtatcaagttcggagaaatggagagagactgtttaatagcgcatggtgcagccaatactattacagaagttttgaaagattcggaagaagattatcaagatgtgtatgtttgtgaaaattgtggagacatagcagcacaaatcaagggtattaatacatgtcttagatgttcaaaacttaatctctctcctctcttaacaaaaattgataccacgcacgtatctaaagtatttcttactcaaatgaacgccagaggcgtaaaagtcaaattagatttcgaacgaaggcctccttcgttttataaaccattagataaagttgatctcaagccgtcttttctggtgtaatattctagtttggtagtagatacatatcaatatcatcaaattcgagatccgaattataaaatgggcgtggattgttaactatagaatcggacgtctgatattcgaaaatctgtggagtttcaggttttggtggaggtgtaactgctacttgggatactgaagtctgatattcagaaagctgtggatgttctggttcggcatccaccgatggtgtcacatcactaatcggttcggtaacgtctgtggatggaggtgctacttctacagaacctgtagcctcagttgtcaacggagatacatttttaatgcgagaaaatgtataatttggtaatggtttcttatgtggatctgaagaagaggtaagatatctactagaaagataccgatcacgttctagttctcttttgtagaacttaactttttctttctccgcatctagttgatattccaacctcttcacgttactacgttcagattccaattcacgttcgcatgggttacctccgcagtttttacgagcgatttcacgttcagccttcatgcgtctctccctctctctatcgagtttatcagagcagtctttctgaaggcgatcgaactccataaatttctccaacgctttgattgtttccatagatttccgaagttcagcttttaggactgtgattctttttctttcgaattcacagctggatgtacaaccgtttccattaccgccatctctaagtttcttttctagatcggcaacatttcatccccatgccttttacattcctcgagtctactgtcgtcgaaatatcgttccagctccttttcgacatcaataactttagcacgttgtctctcaagctctcttttgtagttatctgattccctggcacgtttaagatcttcatgcaattgagtcagctcttaacttcctctcttgcttcttcgtcatagtacgcgcaatcactgtgagatccattgttaccacgtctacactcggcgagctcgcgtttaagagattcaatttcccgtttgtattggtccatgtttccattgctaccaccattagatttacaggctgctagttgtcgttcgagatcagaaatacgggttttcttggaattgatttcgtcgatgtacttggcatcgaaacacttattaagttctttttccaattctacgattttatttctttcgcgagtcaattccctcctgtagtaactatctgttttgtcagattcacgctctctacgtagactttcttgcaagttactaatttgttccctagcacgtccgagtttagttttatatgctgaatagagttctgattcatcctttgagcagatctctagcgatcgtttaagattcctaattctagtctttagcctatttacctcctcagaagatgttccgttaccgttgcgtttacactcgttaagctgtctatcaagatccatgattctatctctaagacgttgcatctctctttccatatcagcattgctttcattattacgtctgcagtcactcaactgtctttcaatatctgagattctatctctaagacgtcgcatctctctctgtttcggcattggtttcattattacgtttacagtcgttcaactgtctttcaagatctgatattctagattggagtctgctaatctctgtagcattttcacggcattcactcagttgtctttcaagatctgaaattttagattggagtctgctaatctctgtaagatttcctcctccgctctcgatgcagtcggtcaacttattctctagttctctaatacgcgaacgcagtgcatcaacttcttgcgtgtcttcctggttgcgtgtacattcatcgagatctctaacgcgtcgtcgttcttcctcaagttctctgcgtactacagaaagcgtgtccctatcttgttgatatttagcaatttctgattctagagtactgattttgcttacgtagttactaatagttgtcttggccttatcaagatcctccttgtatttgtcgcattccttgatatccctacgaagtctggacagttcccattcgacattacgacgtttatcgatttcagctcggagatcgtcatcgcgttgttttagccacatacgactgagttcaagttctcgttgacaagatccatctacttttccattcctaatagtatccagttccttttctagttctgaacgcatttctcgttccctatcaagcgattctctcaattctcggatagtcttcttatcaatttctaataaatctgaaccatcatctgtcccattttgaatatccctgtgttctttgatctcttttgtaagtcggtcgattctttcggttttataaacagaatccctttccaaagtcctaatcttactgagtttatcactaagttctgcattcaattcggtgagttttctcttggcttcttccaactctgttttaaactctccactatttccgcattcttcctcgcatttatctaaccattcaattagtttattaataactagttggtaatcagcgattcctatagccgttcttgtaattgtgggaacataattaggatcttctaatggattgtatggcttgatagcatcatctttatcattattagggggatggacaaccttaattggttggtcctcatctcctccagtagcgtgtggttcttcaataccagtgttagtaataggcttaggcaaatgcttgtcgtacgcgggcacttcctcatccatcaagtatttataatcgggttctacttcagaatattcttttctaagagacgcgacttcgggagttagtagaagaactctgtttctgtatctatcaacgctggaatcaatactcaagttaaggatagcgaatacctcatcgtcatcatccgtatcttctgaaacaccatcatatgacatttcatgaagtctaacgtattgataaatagaatcagatttagtattaaacagatccttaacctttttagtaaacgcatatgtatattttagatctccagatttcataatatgatcacatgccttaaatgtcagtgcttccatgatataatctggaacactaatgggtgacgaaaaagatacagcaccatatgctacgttgataaataaatctgaaccactaagtagataatgattaatgttaagaaagaggaaatattcagtgtataggtatgtcttggcgtcatatcttgtactaaacacgctaaacagtttgttaatgtgatcaatttccaatagattaattagagcagcgggaataccaacaaacatattaccacatccgtattttctatgaatatcacatatcatgttaaaaaatcttgatagaagagcgaatatctcgtctgacttaatgagtcgtagttcagcagcaacataagtcataactgtaaatagaacatactttcctgtagtgttgattctagactccacatcaacaccattattaaaaatagttttatatacatctttaatctgctctccgttaatcgtcgaacgttctagtatacggaaacactttgatttcttatctgtagttaatgacttagtgatatcacgaagaatattacgaattacatttcttgtttttcttgagagacctgattcagaactcaactcatcgttccatagtttttctacctcagtggcgaaatctttggagtgcttggtacatttttcaataaggttcgtgacctccatttattataaaaaatttattcaaaacttaactacaatcgggtaattataagatcgtagatctcccatgtggcggaatactaccatctatcgcatgtggatggacagtaggtaatggccatgggaacagtaatgtttgcatatttatctttcttgctagtattactgcatattgtcccaatgtttcgatgtgatgttctaacctatcaactgccgctgtatcacaacaatagtgtccgatgaaattaagattatgatccaatgtgtttaatatatgattatcaagtcttatacgatccgcgtcttttttgacaggatcaggttcttctacaggaagaagtttcggcctcttatgatattcatgtctgggaaacggtggtctagggtgaggctccggtatcggagtgggttttggattataatcatcatcgtctatgacatcatcttcgacttcgatatttattttgctatcttgatgatgtcctgtatcagttgcattttcagcactcgactgaatattagcgcattcattgtctattattaccatatttctaaacccaaaatgtatgtgttgaacatcagtactatcgttgatgagtcttatagcatgaattcgcttatcgttatcgggtttatcttctgtcaccttagcaattccttttttattaaactctacataatcatatccatttctattgtttgttctaatataaacgagtatagcatcattgctaaatttttcaatagtatcaaaaacagaatatcctaaaccatataatatatattcaggaacactcaaactaaatgtccaggattctcctaaatacgtaaactttaatagtgcgaaatcattcaaaaatctaccacttatagatagatagtacataaatgcgtatagtagtctacctatctctttattatgaaaaccggcattacgatcatatatgtcgtgatatacctgtgatccgtttacgttaaaccataaatacatgggtgatcctataaacatgaatttatttctaattctcagagctatagttaattgaccgtgtaatatttgcttacatgcatacttgatacgcttattaataagatttttatcattgctcgttatttcagaatcgtatatataaggagtaccatcgtgattcttaccagatattatacaaaatactatatataaaatatattgacccacgttagtaatcatataaatgtttaacgttttaaattttgtattcaatgatccattatcatacgctatcatggtcttgtaatattcattctttaaaatataatattgtgttagccattgcattggagctcctaatggagattttctattctcatccattttaggataggctttcataaagtccctaataacttcgtgaataatgtttctatgttttctactgatgcatgtatttgcttcgatttttttatcccatgtttcatctatcatagatttaaacgcagtaatgctcgcaacattaacatcttgaaccgttggtacaattccgttccataaatttataatgttcgccatttatataactcattttttgaatatacttttaattaacaaaagagttaagttactcatatggacgccgtccagtctgaacatcaatctttttagccagagatatcatagccgctcttagagtttcagcgtgattttccaacctaaatagaacttcatcgttgcgtttacaacacttttctatttgttcaaactttgttgttacattagtaatctttttttccaaattagttagccgttgtttgagagtttcctcattgtcgtcttcatcggctttaacaattgcttcgcgtttagcctctggctttttagcagcctttgtagaaaaaaattcagttgctggaattgcaagatcgtcatctccggggaaaagagttccgtccatttaaagtacagattttagaaactgacactctgcgttatttatatttggtacaacacatggattataaatattgatgttaataacatcagaaaatgtaaagtctatacattgttgcatcgtgttaaattttctaatggatctagtattattgggtccaacttctgcctgaaatccaaatatggaagcggatacaaaaccgtttcctggataaaccacacatctccacttttgctttacatcagaaattgtgtcgttgacatcttgaactctcctatctaatgccggtgttccacctatagattttgaatattcgaatgctgcatgagtagcattaaattccttaatattgccataattttcatatattgagtaaccctggataaaaagtaaacacaccgcagccgtcgctaccacaataaaaaaaattgatagagagttcatttataatctattagaagctgacaaaatttttttacacgcatcagacaatgctttaataaatagttcaacatctacttttgtcatatcgaaccgatggtatgattctaacctagaattacatccgaaaaagttgactatgttcatagtcattaagtcattaacaaacaacattccagactctggattataagacgatactgtttcgtcacaattacctaccttaatcatgtgattatgaatattggctattagagcaccttctaagaaatctataatatctttgaaacacgatttaaaatcaaaccacgaatatacttctacgaagaaagttagtttacccataggagaaataactataaatggagatctaaatacaaaatccggatctatgatagttttaacattattatattctctattaaatacctccacatctaaaaatgttaattttgaaactatgtcttcgtttattaccgtacctgaactaaacgctataagctctattgtttgagaactctttaaacgatattcttgaaatacatgtaacaaagtttcctttaactcggtcggtttatctaccatagttacagaatttgtatccttatctataatataataatcaaaatcgtataaagttatataattatcgcgttcagattgtgatcttttcaaatagactaaaaaccccatttctctagtaagtatcttatgtatatgtttgtaaaatatcttcatggtgggaatatgctctaccgcagttagccattcctcattgacagcggtagatgtattagacaaaactattccaatgtttaacaagggccattttacgagattattaaatccttgtttgataaatgtagccaatgagggttcgagttcaacgacgattgaattctcttcccgcggatgctgcatgatgaacgacgggatgttgttcgattgatttggaattctttttcgactttttgtttatattaaatattttaaaatttatagcggatagcaattcatgtaccacggataatgtagacgcgtattgcgcatcgatatctttattattagataaatttatcaataaatgtgagaagtttgcctcgttaaggtcttccatttaaatattatataaacatttgtgtttgtatcttattcgtcttttatggaatagttttttactagtaaagctgcaattacacactttgtccgtaaaacataaatataaacaccagcttttatcaatcgttccaaaaagtcgacggcggacatttttaacatggcatctattttaaatacacttaggtttttggaaaaaacatcattttataattgtaacgattcaataactaaagaaaagattaagattaaacataagggaatgtcatttgtattttataagccaaagcattctaccgttgttaaatacttgtctggaggaggtatatatcatgatgatttggttgtattggggaaggtaacaattaataatctaaagatgatgctattttacatggatttatcatatcatggagtgacaagtagtggagcaatttacaaattgggatcgtctatcgatagactttctctaaataggactattgttacaaaagttaataattatgatgatacattttttgacgacgatgattgatcgctattgcacaattttgtttttgtactttctaatatagtgtttaggttctttttcatatgagaatattgatttactaaaatatctatgtttaacttttgttctatgacgtccttatcggcggtatcggtacatatacgtaattcaccttcacaaaatacggagtcttcgataataatagccaatcgattattggatctagctgtctgtatcatattcaacatgtttaatatatcctttcgtttcccctttacaggcatcgatcgtagcatattttccgcgtctgatatggaaatgttaaaactacaaaaatgcgtaatgttagcccgtcctaatattggtacgtgtctataagtttggcatagtagaataatagacgtgtttaaatgccttccaaagtttaagaattctattagagtattgcattttgatagtttatcgcctacatcatcaaaaataagtaaaaagtgtgctgattttttatgattttgtgcgacagcaatacatttttctatgttacttttagttcgtatcagattatattctagagattcctgactactaacgaaattaatatgatttggccaaatgtatccatcataatctgggttataaacgggtgtaaacaagaatatatgtttatattttttaactagtgtagaaaacagagatagtaaatagatagtttttccagatccagatcctcctgttaaaaccattctaaacggcatttttaataaattttctcttgaaaattgtttttcttggaaacaattcataattatatttacagttactaaattaatttgataataaatcaaaatatggaaaactaaggttgttagtagggaggagaacaaagaaggcacatcgtgatataaataacatttattatcatgatgacaccagaaaacgacgaagagcagacatctgtgttctccgctactgtttacggagacaaaattcagggaaagaataaacgcaaacgcgtgattggtctatgtattagaatatctatggttatttcactactatctatgattaccatgtccgcgtttctcatagtgcgcctaaatcaatgcatgtctgctaacgaggctgctattactgacgccgctgttgccgttgctgctgcatcatctactcatagaaaggttgcgtctagcactacacaatatgatcacaaagaaagctgtaatggtttatattaccagggttcttgttatatattacattcagactaccagttattctcggatgctaaagcaaattgcactgcggaatcatcaacactacccaataaatccgatgtcttgactacctggctcattgattatgttgaggatacatggggatctgatggtaatccaattacaaaaactacatccgattatcaagattctgatgtatcacaagaagttagaaagtatttttgtgttaaaacaatgaactaatatttatttttgtacattaataaatgaaatcgcttaatagacaaactgtaagtaggtttaagaagttgtcggtgccggccgctataatgatgatactctcaaccattattagtggcataggaacatttctgcattacaaagaagaactgatgcctagtgcttgcgccaatggatggatacaatacgataaacattgttatttagatactaacattaaaatgtctacagataatgcggtttatcagtgtcgtaaattacgagctagattgcctagacctgatactagacatctgagagtattgtttagtattttttataaagattattgggtaagtttaaaaaagaccaatgataaatggttagatattaataatgataaagatatagatattagtaaattaacaaattttaaacaactaaacagtacgacggatgctgaagcgtgttatatatacaagtctggaaaactggttaaaacagtatgtaaaagtactcaatctgtactatgtgttaaaaaattctacaagtgacaacaaaaaatgaattaataataagtcgttaacgtacgccgccatggacgccgcgtttgttattactccaatgggtgtgttgactataacagatacattgtatgatgatctcgatatctcaatcatggactttataggaccatacattataggtaacataaaaactgtccaaatagatgtacgggatataaaatattccgacatgcaaaaatgctactttagctataagggtaaaatagttcctcaggattctaatgatttggctagattcaacatttatagcatttgtgccgcatacagatcaaaaaataccatcatcatagcatgcgactatgatatcatgttagatatagaagataaacatcagccattttatctattcccatctattgatgtttttaacgctacaatcatagaagcgtataacctgtatacagctggagattatcatctaatcatcaatccttcagataatctgaaaatgaaattgtcgtttaattcttcattctgcatatcagacggcaatggatggatcataattgatgggaaatgcaatagtaattttttatcataaaagttgtaaagtaaataataaaacaataaatattgaactagtagtacgtatattgagcaatcagaaatgatgctggtacctcttatcacggtgaccgtagttgcgggaacaatattagtatgttatatattatatatttgtaggaaaaagatacgtactgtctataatgacaataaaattatcatgacaaaattaaaaaagataaagagttctaattccagcaaatctagtaaatcaactgatagcgaatcagactgggaggatcactgtagtgctatggaacaaaacaatgacgtagataatatttctaggaatgagatattggacgatgatagcttcgctggtagtttaatatgggataacgaatccaatgttatggcgcctagcacagaacacatttacgatagtgttgctggaagcacgctgctaataaataatgatcgtaatgaacagactatttatcagaacactacagtagtaattaatgaaacggagactgttgaagtacttaatgaagataccaaacagaatcctaactattcatccaatcctttcgtaaattataataaaaccagtatttgtagcaagtcaaatccgtttattacagaacttaacaataaatttagtgagaataatccgtttagacgagcacatagcgatgattatcttaataagcaagaacaagatcatgaacacgatgatatagaatcatcggtcgtatcattggtgtgattagtttcctttttataaaattgaagtaatatttagtattattgctgccgtcacgttgtacaaatggagatattccctgtattcggcatttctaaaattagcaattttattgctaataatgactgtagatattatatagatacagaacatcaaaaaattatatctgatgagatcaatagacagatggatgaaacggtacttcttaccaacatcttaagcgtagaagttgtaaatgacaatgagatgtaccatcttattcctcatagattatcgacgattatactctgtattagttctgtcggaggatgtgttatctctatagataatgacatcaatggcaaaaatattctaacctttcccattgatcatgctgtaatcatatccccactgagtaaatgtgtcgtagttagcaagggtcctacaaccatattggttgttaaagcggatatacctagcaaacgattggtaacatcgtttacaaacgacatactatatgtaaacaatctgtcactgattaattatttgccgttgtctgtattcattattagacgagtcaccgactatttggatagacacatatgcgatcagatatttgctaataataagtggtattcccttataaccatcgacgataagcaatatcctattccatcaaactgtataggtatgtcctctgccaagtacataaattctagcatcgagcaagatactttaatccatgtttgtaacctcgagcatccgttcgactcagtatacaaaaaaatgcagtcgtacaattctctacctatcaaggaacaaatattgtacggtagaattgataatataaatatgagcattagtatttctgtggattaatagatttctagtatggggatcattaatcatctctaatctctaaatacctcataaaacgaaaaaaaagctattatcaaatactgtacggaatggattcattctcttctctttttatgaaactctgttgtatatctactgataaaactggaagcaaaaaatctgatagaaagaataagaataagatcaaggattatatggaacacgattattataaaataacaatagttcctggttcctcttccacgtctactagctcgtggtattatacacatgcctagtaatagtctctttgcgttgacggaaagcagactagaaataacaggctaaaatgttcagacaccataatagttcccaacccagataataacagagttccatcaacacattcctttaaactcaatcccaaacccaaaaccgttaaaatgtatccggccaattgatagtagataatgaggtgtacagcgcatgataatttacacagtaaccaaaatgaaaatactttagtaattataagaaatatagacggtaatgtcatcatcaacaatccgataatatgcctgagagtaaacattgacggataaaacaaaaatgctccgcataactctatcatggcaataacacaaccaaatacttgtaagattcctaaattagtagaaaatacaacgaatatcgatgtataagtgatctcgagaaataataagaataaagtaatgcccgtaaagataaacatcaacattgtttggtaatcattaaaccaattagtatgaagttgaactaatttcacagtagattttattccagtgttatcctcgcatgtataagtacctggtaagatatctttatattccataatcaatgagacatcactatctgataacgaatgaagtctagcactagtatgccatttacttaatattgtcgtcttggaagttttattataagttaaaatatcatggttatccaatttccatctaatatactttgtcggattatctatagtacacggaataatgatggtatcattacatgctgtatactctatggtctttgtagttgttataacaaccaacgtatagaggtatatcaacgatattctaactcttgacattttttatttatttaaaatgatacctttgttatttattttattctattttgctaacggtattgaatggcataagtttgaaacgagtgaagaaataatttctacttacttattagacgacgtattatacacgggtgttaatggggcggtatacacattttcaaataataaactaaacaaaactggtttaactaataataattatataacaacatctataaaagtagaggatgcggataaggatacattagtatgcggaaccaataacggaaatcccaaatgttggaaaatagacggttcagacgacccaaaacatagaggtagaggatacgctccttatcaaaatagcaaagtaacgataatcagtcacaacggatgtgtactatctgacataaacatatcaaaagaaggaattaaacgatggagaagatttgacggaccatgtggttatgatttattcacggcggataacgtaattccaaaagatggtttacgaggagcattcgtcgataaagacggtacttatgacaaagtttacattcttttcactgatactatcggctcaaagagaattgtcaaaattccgtatatagcacaaatgtgcctaaacgacgaaggtggtccatcatcattgtctagtcatagatggtcgacgtttctcaaagtcgaattagaatgtgatatcgacggaagaagttatagacaaattattcattctagaactataaaaacagataatgatacgatactatatgtattcttcgatagtccttattccaagtccgcattatgtacctattctatgaataccattaaacaatctttttctacgtcaaaattggaaggatatacaaagcaattgccgtctccagctcctggtatatgtttaccagctggaaaagttgttccacataccacgtttgaagtcatagaacaatataatgtactagatgatattataaagcctttatctaaccaacctatcttcgaaggaccgtctggtgttaaatggttcgatataaaggagaaggaaaatgaacatcgggaatatagaatatacttcataaaagaaaattctatatattcgttcgatacaaaatctaaacaaactcgtagctcgcaagtcgatgcgcgactattttcagtaatggtaactgcgaaaccgttatttatagcagatatagggataggagtaggaatgccacaaatgaaaaaaatacttaaaatgtaatcttaatcgagtacaccacacgacaatgaacaaacataagacagattatgctggttatgcttgctgcgtaatatgcggtctaattgtcggaattatttttacagcgacactattaaaagttgtagaacgtaaattagttcatacaccattaatagataaaacgataaaagatgcatatattagagaagattgtcctactgactggataagctataataataaatgtatccatttatctactgatcgaaaaacctgggaggaaggacgtaatgcatgcaaagctctaaattcaaattcggatctaattaagatagagactccaaacgagttaagttttttaagaagccttagacgaggctattgggtaggagaatccgaaatattaaaccagacaaccccatataattttatagctaagaatgccacgaagaatggaactaaaaaacggaaatatatttgtagcacaacgaatactcccaaactgcattcgtgttacactatataacaattacactacatttttatcataccactacttcggttagatgttttagaaaaaaataaatatcgccgtaccgttcttgtttttataaaaataacaattaacaattatcaaattttttctttaatattttacgtggttgaccattcttggtggtaaaataatctcttagtgttggaatggaatgctgtttaatgtttccacactcatcgtatattttgacgtatgtagtcacatcgtttacgcaatagtcagactgtagttctatcatgcttcctacatcagaaggaggaacagttttaaagtctcttggttttaatctattaccgttagttttcatgaaatcctttgttttatccacttcacattttaaataaatgtccactatacattcttttgttaattttactagatcgtcatgggtcatagaatttataggttccgtagtccatggatccaaactagcaaacttcgcgtatacggtatcgcgattagtgtatacaccaactgtatgaaaattaagaaaacagtttaataaatcaacagaaatatttaatcctccgtttgatacagatgcgccatatttatggatttcggattcacacgttgtttgtctgaggtgttcgtctagtgttgcttctacgtaaacttcgattcccatatattctttattgtcagaatcgcataccgatttatcatcatacactgtttgaaaactaaatggtatacacatcaaaataataaataataacgagtacattctgcaatattgttatcgtaattggaaaaatagtgttcgagtgagttggattatgtgagtattggattgtatattttattttatattttgtaataagaataaaatgctaatgtcaagtttattccaatagatgtcttattaaaaacatatataataaataacaatggctgaatggcataaaattatcgaggatatctcaaaaaataataagttcgaggatgccgccatcgttgattacaagactacaaagaatgttctagctgctattcctaacagaacatttgccaagattaatccgggtgaaattattcctctcatcactaatcgtaatattctaaaacctcttattggtcagaaatattgtattgtatatactaactctctaatggatgagaacacgtatgctatggagttgcttactgggtacgcccctgtatctccgatcgttatagcgagaactcataccgcacttatatttttgatgggtaagccaacaacatccagacgtgacgtgtatagaacgtgtagagatcacgctacccgtgtacgtgcaactggtaattaaaataaaaagtaatattcatatgtagtgtcaattttaaatgatgatgatgaaatggataatatccatattgacgatgtcaataatgccggtattggcatacagttcatcgatttttagatttcattcagaggatgtggaattatgttatgggcatttgtattttgataggatctataatgtagtaaatataaaatataatccgcatattccatatagatataattttattaatcgcacgttaaccgtagatgaactagacgataatgtcttttttacacatggttattttttaaaacacaaatatggttcacttaatcctagtttgattgtctcattatcaggaaacttaaaatataatgatatacaatgctcagtaaatgtatcgtgtctcattaaaaatttggcaacgagtacatctactatattaacatctaaacataagacttattctctacatcggtccacgtgtattactataataggatacgattctattatatggtataaagatataaatgacaagtataatgacatctatgattttactgcaatatgtatgctaatagcgtctacattgatagtgaccatatacgtgtttaaaaaaataaaaatgaactcttaattatgctatgctattagaaatggataaaatcaaaattacggttgattcaaaaattggtaatgttgttaccatatcgtataacttggaaaagataactattgatgtcacacctaaaaagaaaaaagaaaaggatgtattattagcgcaatcagttgctgtcgaagaggcaaaagatgtcaaggtagaagaaaaaaatattatcgatattgaagatgacgatgatatggatgtagaaagcgcgtaatacgatctataaaaataagtatataaatactttttatttactgtactcttactgtgtagtggtgataccctactcgattatttttttaaaaaaaaaatacttattctgattcttctagccatttccgtgttcgtttgaatgccacatcgacgtcaaagataggggagtagttgaaatctagttctgcattgttggtacgcacctcaaatgtagtgttggatatcttcaacgtatagttgttgagtagtgatggttttctaaatagaattctcttcatatcattcttgcacgcgtacatttttagcatccatcttggaatcctagatccttgttctattcccaatggtttcatcaatagaagattaaacatatcgtacgaacacgatggagagtaatcgtagcaaaagtaagcatttcctttaatcttagatcccggatactggatatattttgcagccaacacgtgcatccatgcagcatttcctacatatacccggctatgcaccgcgtcatcatcgactgtacgatacataatgttaccgtgttgcttacattgctcgtaaaagactttcatcaatttgtctccttctccgtaaattccagtgggtcttaggcaacaagtatacaattttgctccattcatgattacggaattattggctttcataaccagttgctcggccatacgtttactttttgcgtatacatgtcctggtgatatatcataaagggtatgctcatggccgatgaatggatcaccgtgtttattgggtcctattgcttccatgctactagtatagatcaaatacttgattcctaggtccacacaagctgccaaaatagtctgtgttccataatagtttactttcatgatttcattatcggtgtattttccaaatacatccactagagcagccgtatgaataatcagatttaccccatctagcgcttctctcaccttatcaaagtcgtttatatcacattgtatatagtttataaccttaactttcgaggttattggttgtggatcttctacaatatctatgactctgatttcttgaacatcatctgcactaattaacagttttactatatacctgcctagaaatccggcaccaccagtaaccgcgtacacggccattgctgccactcataatatcagactacttattctattttactaaataatggctgtttgtataatagaccacgataatatcagaggagttatttactttgaaccagtccatggaaaagataaagttttaggatcagttattggattaaaatccggaacgtatagtttgataattcatcgttacggagatattagtcaaggatgtgattccataggcagtccagaaatatttatcggtaacatctttgtaaacagatatggtgtagcatatgtttatttagatacagatgtaaatatatttacaattattggaaaggcgttatctatttcaaaaaatgatcagagattagcgtgtggagttattggtatttcttacataaatgaaaagataatacattttcttacaattaacgagaatggcgtttgatatatcagttaatgcgtctaaaacaataaatgcattagtttacttttctactcagcaaaataaattagtcatacgtaatgaagttaatgatacacactacactgtcgaatttgatagggacaaagtagttgacacgtttatttcatataatagacataatgacaccatagagataagaggggtgcttccagaggaaactaatattggttgcgcggttagtatgacttacttgtataataagtatagttttaaactgattttagcagaatatataagacacagaaatactatatccggcaatatttattcggcattgatgacactagatgatttggctattaaacagtatggagacattgatctattatttaatgagaaacttaaagtagactccgattcgggactatttgactttgtcaactttgtaaaggatatgatatgttgtgattctagaatagtagtagctctatctagtctagtatctaaacattgggaattgacaaataaaaaatataggtgtatggcattagccgaacatatatctgatagtattccaatatctgagctatctagactacgatacaatctatgtaagtatctacgcggacacactgagagcatagaggataaatttgattattttgaagacgatgattcgtctacatgttctgccgtaaccgacagggaaacggatgtataattttttttatagcgtgaaggatatgataaaaaatataattgttgtatttatcccattccaatcaccttatatgattctgtaacacaataaaggagtcttatagatgtatagaggtcagatactggtttgataaactgtttattccacataagtatgtttgactttatggttagacccgcatactttaacaaatcactgaaaattggagttaggtattgacctctcagaatcagttgccgttctggaacattaaatgtattttttatgatatactccaacgcatttatgtgggcatacaacaagtcattactaatggaatattccaagagttttagttgtctagtatttaacaagagaagagatttcaacagactgtttatgaactcgaatgccgcctcattgtcgcttatattgatgatgtcgaattctcccaatatcatcaccgatgagtagctcatcttgttatcgggatccaagttttctaaagatgtcattaaaccctcgatcatgaatggatttatcatcatcgtttttatgttggacatgagcttagtccgtttgtccacatctatagaagatgatttctgaattatttcatatatctctctctttaactccaggaacttgtcaggatggtctactttaatatgttctcgtctaagagatgaaaatctttggatggttgcacgcgacttttctctaaaggatgacgttgcccaagatcctctcttaaatgaatccatcttatccttggacaagatggacagtctattttccttagatggtttaatatttttgttacccatgatctataaaggtagacctaatcgtctcggatgaccatatatttattttcagttttattatacgcataaattgtaaaaaatatgttaggtttacgaaaatgtctcgtggggcattaatcgtttttgaaggattggacaaatctggaaaaacaacacaatgtatgaacatcatggaatcaataccttcaaacacaataaaataccttaactttcctcagagatccactgtcactggaaagatgatagatgactatctaactcgtaaaaaaacctataatgatcatatagttaatctattattttgtgcaaatagatgggagtttgcatcttttatacaagaacaactagaacagggaattactttaatagttgatagatacgcattttctggagtagcgtatgccgccgctaaaggcgcgtcaatgactctcagtaagagttatgaatctggattgcctaaacccgacttagttatattcttggaatctggtagcaaagaaattaatagaaacgtcggtgaggaaatttatgaagatgttacattccaacaaaaggtattacaagaatataaaaaaatgattgaagaaggagatattcattggcaaattatttcttctgaattcgaggaagatgtaaagaaggagttgattaagaatatagttatagaggctatacacacggttactggaccagtggggcaactgtggatgtaatagtgaaattacattttttataaatagatgttagtacagtgttataaatggatgaagcatattactctggcaacttggaatcagtactcggatacgtgtccgatatgcataccgaactcgcatcaatatctcaattagttattgccaagatagaaactatagataatgatatattaaacaaggacattgtaaattttatcatgtgtagatcaaacttggataatccatttatctctttcctagatactgtatatactattatagatcaagagaactatcagactgagttgattaattcattagacgacaatgaaattatcgattgtatagttaataagtttatgagcttttataaggataacctagaaaatatagtagatgctatcattactctaaaatatataatgaataatccagattttaaaactacgtatgccgaagtactcggttccagaatagccgatatagatattaaacaagtgatacgtaagaatatactacaattgtctaataatatccgcgaacgatatttgtgaaaatattaaaaaaaaatactttttttattaaatgacgtcttttcgtgaatttagaaaattatgctgtgctatatatcacgcatcaggatataaagaaaaatctaaattaattagagactttataacagatagggatgataaatatttgatcattaagctattgcttcccggattagacgatagaatttataacatgaacgataaacaaattataaaattatatagtataatatttaaacaatctcaggaagatatgctacaagatttaggatacggatatataggagacactattaggactttcttcaaagagaacacagaaatccgtccacgagataaaagcattttaactttagaagaagtggatagttttttaactacgttatcatccgtaactaaagaatcgcatcaaataaaattattgactgatgtagcatctgtttgtacatgtaatgatttaaaatgtgtagtcatgcttattgataaagatctaaaaattaaagcgggtcctcggtacgtacttaacgctattagtcctaatgcctatgatgtgtttagaaaatctaataacttgaaagagataatagaaaattcatctaaacaaaatctagactctatatctatttctgttatgactccaattaatcccatgttagcggaatcgtgtgattctgtcaataaggcgtttaaaaaatttccatcaggaatgtttgcggaagtcaaatacgatggtgaaagagtacaagttcataaaaataataacgagtttgccttctttagtagaaacatgaaaccagtactctctcataaagtggattatctcaaagaatacataccgaaagcatttaaaaaagctacgtctatcgtattggattctgaaattgttcttgtagacgaacataatgtaccgctcccgtttggaagtttaggtatacacaaaaagaaagaatataaaaactctaacatgtgtttgttcgtgtttgactgtttgtactttgatggattcgatatgacggacattccattgtacgaacgaagatcttttctcaaagatgttatggttgaaatacccaatagaatagtattctcagagttgacgaatattagtaacgagtctcagttaactgacgtattggatgatgcactaacgagaaaattagaaggattggtcttaaaagatattaatggagtatacgaaccgggaaagagaagatggttaaaaataaagcgagactatttgaacgagggttccatggcagattctgccgatttagtagtactaggtgcctactatggtaaaggagcaaagggtggtatcatggcagtctttctaatgggttgttacgacgatgaatccggtaaatggaagacggttaccaagtgttcaggacacgatgataatacgttaagggagttgcaagaccaattaaagatgattaaaattaacaaggatcccaaaaaaattccagagtggttagtagttaataaaatctatattcccgattttgtagtagaggatccgaaacaatctcagatatgggaaatttcaggagcagagtttacatcttccaagtcccataccgcaaatggaatatccattagatttcctagatttactaggataagagaggataaaacgtggaaagaatctactcatctaaacgatttagtaaacttgactaaatcttaatagttacatacaaactgaaaattaaaataacactatttagttggtggtcgccatggatggtgttattgtatactgtctaaacgcgctagtaaaacatggcgaggaaataaatcatataaaaaatgatttcatgattaaaccatgttgtgaaagagtttgtgaaaaagtcaagaacgttcacattggcggacaatctaaaaacaatacagtgattgcagatttgccatatatggataatgcggtatccgatgtatgcaattcactgtataaaaagaatgtatcaagaatatccagatttgctaatttgataaagatagatgacgatgacaagactcctactggtgtatataattattttaaacctaaagatgccattcctgttatcatatctataggaaaggataaagatgtctgtgaactattaatctcatcagacatatcgtgtgcatgcgtggagttaaattcatatcacgtagccattcttcccatggatgtttccttttttaccaaaggaaatgcatcattgattattctcctgtttgatttctctatcgatgcggcacctctcttaagaagtgtaaccgataataatgttattatatctagacaccagcgtctacatgacgagcttccgagttccaattggttcaagttttacataagtataaagtccgactattgttctatattatatatggttgttgatggatctgtgatgcatgcgatagctgataatagaactcacgcaattattagcaaaaatatattagacaatactacgattaacgatgagtgtagatgctgttattttgaaccacagattaggattcttgatagagatgagatgctcaatggatcatcgtgtgatatgaacagacattgtattatgatgaatttacctgatgtaggcgaatttggatctagtatgttggggaaatatgaacctgacatgattaagattgctctttcggtggctggtaatttaataagaaatcgagactacattcccgggagacgaggatatagctactacgtttacggtatagcctctagataatttttttaagcacgaaataaaaaacataattttaaaccaatctatttcatactattttgtgtgatcaccatggacataaagatagatattagtatttctggtgataaatttacggtgactactaggagggaaaatgaagaaagaaaaaaatatctacctctccaaaaagaaaaaactactgatgttatcaaacctgattatcttgagtacgatgacttgttagatagagatgagatgtttactattctagaggaatattttatgtacagaggtctattaggcctcagaataaaatatggacgactctttaacgaaattaaaaaattcgacaatgatgcggaagaacaattcggtactatagaagaactcaagcagaaacttagattaaattctgaagagggagcagataactttatagattatataaaggtacaaaaacaggatatcgtcaaacttactgtatacgattgcatatctatgataggattgtgtgcatgcgtggtagatgtttggagaaatgagaaactgttttctagatggaaatattgtttacgagcgattaaactgtttattgatgatcacatgcttgataagataaaatctatactgcagaatagactagtatatgtggaaatgtcatagaaagttaaaagttaatgagagcaaaaatatataaggttgtattccatatttgttatttttttctgtaatagttagaaaaatacattcgatggtctatctatcagattattatgtgttataaggtactttttctcataataaactagagtatgagtaagatagtgtttttcaaaacatataaatctaaaattgatggatgagatatacagctattaatttcgaaaatatattttaatctgataactttaaacatggatttttaatggtggtttaacgttttaaaaaaagattttgttattgtagtatatgataatattaaaagatggatataaagaatttgctgactgcatgtactattttttacattactacattggctacggcagatatacctacttcgtcactgccacacgctccggtaaacggggcatgtgacgagggagaatatcttgataagaggcataatcaatgttgtaatcagtgtccacctggagaatttgccaaggttagatgtaatggtaacgataacacaaaatgtgaacgctgcccacctcatacatataccgcaatccccaattactctaatggatgtcatcaatgtagaaaatgcccaacaggatcatttgataaggtaaagtgtaccggaacacagaacagtaaatgttcgtgtcttcctggttggtattgcgctactgattcttcacagactgaagattgtcgagattgtataccaaaaaggagatgtccatgcggatactttggtggaatagatgaacaaggaaatcctatttgtaaatcgtgttgtgttggtgaatattgcgactacctacgtaattatagacttgatccatttcctccatgcaaactatctaaatgtaattaattatgattttgatgataatgttaccatacattatatcgctacttggttagtgtattattcagtatgaagacctattaataattacttatcttttgacgatcttgttataattataatataaaaatacttatggcatagtaactcataattgctgacgcgataaattcgtaataatctgttttgttcaaatttttataaggaatctacaggcataaaaataaaaatataatttataatatactcttacagcgcgccatcatgaataacagcagtgaattgattgctgttattaatggatttagaaatagtggacgattttgtgatattaatatagttattaatgatgaaaggataaacgctcacagactcatcctatctggagcctccgaatatttttccattctgttttccaataattttatcgattctaatgaatacgaagttaatctaagtcatttagattatcaaagtgttaacgatttgatcgattacatttatgggatacctttgagcctaactaacgataacgtgaaatatattctttcaaccgctgattttttacaaattggatctgctattacggagtgtgaaaattacatacttaaaaatctttgttctagaaactgtatcgatttctacatatacgctgataaatataataacaagaaaatagaatcagcgtcgtttaacacaatattacaaaatattttgagactcatcaacgatgaaaactttaaatacttaacagaggaatcaatgataaaaattttaagcgatgatatgttaaatataaaaaatgaggatttcgccccactaattctcattaaatggttagagagtactcaacaaccatgcaccgtcgagttacttaaatgcctcagaatatcattgctttccccacaagttataaaatcactttatagtcatcgactggttagttcaatctacgaatgtataacattcttaaacaatatagcattcttggatgaatcatttcctagataccatagcatcgagttgatatctatcggtataagtaattcgcatgataagatttccataaactgctacaatcataaaaaaaatacatgggaaatgatatcttcacgtagatataggtgtagtttcgcagtggccgtcctggataatattatctatatgatgggtggatatgatcagtccccgtatagaagttcaaaggttatagcgtacaatacatgtacaaattcttggatatatgatataccagagctaaaatatcctcgttctaattgtgggggactggctgatgacgaatacatttattgtataggcggcatacgcgatcaggattcatcgttgacatctagtattgatagatggaagccatcaaaaccatattggcagaagtatgctaaaatgcgcgaaccaaaatgtgatatgggggttgcgatgttaaacggattaatatatgttataggtggaatcgttaaaggtgacacgtgtaccgacgcactagagagtttatcagaagatggatggatgaagcatcaacgtcttccaataaaaatgtccaatatgtcgacgattgttcatgatggcaagatttatatatctggaggttacaacaatagtagtgtagttaatgtaatatcgaatctagtccttagctataattcgatatatgatgaatggaccaaattatcatcattaaacattcctagaattaatcccgctctatggtcagcgcataataaattatatgtaggaggaggaatatctgatgatgttcgaactaatacatctgagacatacgacaaagaaaaagattgttggacattggataatggtcacgtgttaccacgcaattatataatgtataaatgcgaaccgattaaacataaatatccattggaaaaaacacagtacacgaatgattttctaaagtatttggaaagttttataggtagttgatagaacaaaatacataattttgtaaaaataaatcactttttatactaatatgacacgattaccaatacttttgttactaatatcattagtatacgctacaccttttcctcagacatctaaaaaaataggtgatgatgcaactctatcatgtaatcgaaataatacaaatgactacgttgttatgagtgcttggtataaggagcccaattccattattcttttagctgctaaaagcgacgtcttgtattttgataattataccaaggataaaatatcttacgactctccatacgatgatctagttacaactatcacaattaaatcattgactgctagagatgccggtacttatgtatgtgcattctttatgacatcaactacaaatgacactgataaagtagattatgaagaatactccacagagttgattgtaaatacagatagtgaatcgactatagacataatactatctggatctacacattcaccggaaactagttctgagaaacctgattatatagataattctaattgctcgtcggtattcgaaatctaagctcttttttttttttttttttttggcatataaataagtcgaccaccatggtgggtgaggatagcgtgctgatcaccgagaacatgcacatgaaactgtacatggagggcaccgtgaacgaccaccacttcaagtgcacatccgagggcgaaggcaagccctacgagggcacccagaccatgaagatcaaggtggtcgagggcggccctctccccttcgccttcgacatcctggctaccagcttcatgtacggcagcaaaacctttatcaaccacacccagggcatccccgacttctttaagcagtccttccctgagggcttcacatgggagaggatcaccacatacgaagacgggggcgtgctgaccgctacccaggacaccagcctccagaacggctgcctcatctacaacgtcaagatcaacggggtgaacttcccatccaacggccctgtgatgcagaagaaaacactcggctgggaggccagcaccgagatgctgtaccccgctgacagcggcctgagaggccatagccagatggccctgaagctcgtgggcgggggctacctgcactgctccctcaagaccacatacagatccaagaaacccgctaagaacctcaagatgcccggcttctacttcgtggacaggagactggaaagaatcaaggaggccgacaaagagacctacgtcgagcagcacgagatggctgtggccaggtactgcgacctgcctagcaaactggggcacagctgattaattaatttttatcgatctaattcaacaatgtctggagagcttcgcaggatcccgactccggaaccaattactgataaagaagatcatacagttacagacactgtctcatacactacagtaagtacatcatctggaattgtcactactaaatcaaccaccgatgatgcggatctttatgatacgtacaatgataatgatacagtaccaccaactactgtaggcggtagtacaacctctattagcaattataaaaccaaggactttgtagaaatatttggtattaccgcattaattatattgtcggccgtggcaattttctgtattacatattatatatataataaacgttcacgtaaatacaaaacagagaacaaagtctagatttttgacttacataaatgtctgggatagtaaaatctatcatattgagcggaccatctggtttaggaaagacagccatagccaaaagactatgggaatatatttggatttgtggtgtcccataccactagatttcctcgtcctatggaacgagaaggtgttgattaccattacgttaacagagaggccatctggaagggaatagccgccggaaactttctagaacatactgagtttttaggaaatatttacggaacttctaaaacagctgtgaatacagcggctattaataatcgtatttgtgtgatggatctaaacatcgacggtgttagaagtcttaaaaatacgtacctaatgccttactcggtgtatataagacctacctctcttaaaatggttgagaccaagcttcgtcgtagaaacactgaagctaacgatgagattcatcgtcgtgtgatgttggcaaaaactgacatggatgaggcaggtgaagccggtctattcgacactattatcattgaagatgatgtgaatttagcatatagtaagttaattcagatactacaggaccgtattagaatgtattttaacactaattagagacttaagacttaaaacttgataattaataatataactcgtttttatatgtgtctatttcaacgtctaatgtattagttaaatattaaaacttaccacgtaaaacttaaaatttaaaatgatatttcattgacagatagatcacacattatgaactttcaaggacttgtgttaactgacaattgcaaaaatcaatgggtcgttggaccattaataggaaaaggtggattcggtagtatttatactactaatgacaataattatgtagtaaaaatagagcccaaagctaacggatcattatttaccgaacaggcattttatactagagtacttaaaccatccgttatcgaagaatggaaaaaatctcacaatataaagcacgtaggtcttatcacgtgcaaggcatttggtctatacaaatccattaatgtggaatatcgattcttggtaattaatagattaggtgcagatctagatgcggtgatcagagccaataataatagactaccaaaaaggtcggtgatgttgatcggaatcgaaatcttaaataccatacaatttatgcacgagcaaggatattctcacggagatattaaagcgagtaatatagtcttagatcaaatagataagaataaattatatctagtggattacggattggtttctaaattcatgtctaatggcgaacatgttccatttataagaaatccaaataaaatggataacggtactctagaatttacacctatagattcgcataaaggatacgttgtatctagacgtggagatctagaaacacttggatattgtatgattagatggttgggaggtatcttaccatggactaagatatctgaaacaaagaattgtgcattagtaagtgccacaaaacagaaatatgttaacaatactgcgactttgttaatgaccagtttgcaatatgcacctagagaattgctgcaatatattaccatggtaaactctttgacatattttgaggaacccaattacgacaagtttcggcacatattaatgcagggtgtatattattaagtgtggtgtttggtcgataaaaattaaaaaataacttaatttattattgatctcgtgtgtacaaccgaaatcatggcgatgttttacgcacacgctctcggtgggtacgacgagaatcttcatgcctttcctggaatatcatcgactgttgccaatgatgtcaggaaatattctgttgtgtcagtttataataacaagtatgacattgtaaaagacaaatatatgtggtgttacagtcaggtgaacaagagatatattggagcactgctgcctatgtttgagtgcaatgaatatctacaaattggaaatccgatccatgatcaagaaggaaatcaaatctctatcatcacatatcgccacaaaaactactatgctctaagcggaatcgggtacgagagtctagacttgtgtttggaaggagtagggattcatcatcacgtacttgaaacaggaaacgctgtatatggaaaagttcaacatgattattctactatcaaagagaaggccaaagaaatgagtgcacttagtccaggacctatcatcgattaccacgtctggataggagattgtatctgtcaagttactgctgtggacgtacatggaaaggaaattatgaaaatgagattcaaaaagggtgcggtgcttccgatcccaaatctggtaaaagttaaacttggggagaatgatacagaaaatctttcttctactatatcggcggcaccatcgaggtaaccacctctctggaagacagcgtgaatcatgtactcatgaaacgtttggaaactatacgccatatgtggtctgttgtatatgatcattttgatattgtgaatggtaaagaatgctgttatgtgcatacgcattcatctaatcaaaatcctataccgagtactgtaaaaacaaatttgtacatgaagactatgggatcatgcattcaaatggattccatggaagctctagagtatcttagcgaactgaaggaatcaggtggatggagtcccagaccagaaatgcaggaatttgaatatccagatggagtggaagacactgaatcaattgagagattggcagaggagttcttcaatagatcagaacttcaggctggtgaatcagtcaaatttggtaattctattaattgttaaacatacatctgtttcagctaagcaactaagaacacgtatacggcagcagcttccttctatactctcatcttttaccaacacaaagggtggatatttgttcattggagttgataataatacacacaaagtatttggattcacggtgggttacgactacctcagactgatagagaatgatatagaaaagcatatcaaaagacttcgtgttgtgcatttctgtgagaagaaagaggacatcaagtacgcgtgtcgattcatcaaggtatataaacctggggatgagactacctcgacatacgtgtgcgctatcaaagtggaaagatgctgttgtgctgtgtttgcagattggccagaatcatggtatatggatactaatggtatcaagaagtattctccagatgaatgggtgtcacatataaaattttaattaatgtaactatagagaacaaataataaggttgtaatatcatatagacaataactaacaattaattagtaactgttatctcttttttaactaaccaactaactatatacctattaatacatcgtaattatagttcttaacatctattaatcattaattcgcttctttaattttttataaactaacattgttaattgaaaagggataacatgttacagaatataaattatatatggatttttttaaaaaggaaatacttgactggagtatatatttatctcttcattatatagcacgcgtgttttccaatttttccacatcccatataatacaggattataatctcgttcgaacatacgagaaagtggataaaacaatagttgattttttatctaggttgccaaatttattccatattttagaatatggggaaaatattctacatatttattctatggatgatgctaatacgaatattataattttttttctagatagagtattaaatattaataagaacgggtcatttatacacaatctcgggttatcatcatccattaatataaaagaatatgtatatcaattagttaataatgatcatccagataataggataagactaatgcttgaaaatggacgtagaacaagacattttttgtcctatatatcagatacagttaatatctatatatgtattttaataaatcatggattttatatagatgccgaagacagttacggttgtacattattacatagatgtatatatcactataagaaatcagaatcagaatcatacaatgaattaattaagatattgttaaataatggatcagatgtagataaaaaagatacgtacggaaacacaccttttatcctattatgtaaacacgatatcaacaacgtggaattgtttgagatatgtttagagaatgctaatatagactctgtagactttaatagatatacacctcttcattatgtctcatgtcgtaataaatatgattttgtaaagttattaatttctaaaggagcaaatgttaatgcgcgtaataaattcggaactactccattttattgtggaattatacacggtatctcgcttataaaactatatttggaatcagacacagagttagaaatagataatgaacatatagttcgtcatttaataatttttgatgctgttgaatctttagattatctattatccagaggagttattgatattaactatcgtactatatacaacgaaacatctatttacgacgctgtcagttataatgcgtataatacgttggtctatctattaaacaaaaatggtgattttgagacgattactactagtggatgtacatgtatttcggaagcagtcgcaaacaacaacaaaataataatggaagtactattgtctaaacgaccatctttgaaaattatgatacagtctatgatagcaattactaaacataaacagcataatgcagatttattgaaaatgtgtataaaatatactgcgtgtatgaccgattatgatactcttatagatgtacagtcgctacagcaatataaatggtatattttaagatgtttcgatgaaatagatatcatgaagagatgttatataaaaaataaaactgtattccaattagttttttgtatcaaagacattaatactttaatgagatacggtaaacatccttctttcgtgaaatgcactagtctcgacgtatacggaagtcgtgtacgtaatatcatagcatctattagatatcgtcagagattaattagtctattatccaagaagctggatcctggagataaatggtcgtgttttcctaacgaaataaaatataaaatattggaaaactttaacgataacgaactatccacatatctaaaaatcttataaacattattaaaatataaaatctaagtaggataaaatcacactacatcattgtttccttttagtgctcgacagtgtatactatttttaacgctcataaataaaaatgaaaacgatttccgttgttacgttgttatgcgtactacctgctgttgtttattcaacatgtactgtacccactatgaataacgctaaattaacgtctaccgaaacatcgtttaatgataaccagaaagttacgtttacatgtgatcagggatatcattctttggatccaaatgctgtctgtgaaacagataaatggaaatacgaaaatccatgcaaaaaaatgtgcacagtttctgattatgtctctgaactatataataaaccgctatacgaagtgaattccaccatgacactaagttgcaacggcgaaacaaaatattttcgttgcgaagaaaaaaatggaaatacttcttggaatgatactgttacgtgtcctaatgcggaatgtcaacctcttcaattagaacacggatcgtgtcaaccagttaaagaaaaatactcatttggggaatatatgactatcaactgtgatgttggatatgaggttattggtgcttcgtacataagttgtacagctaattcttggaatgttattccatcatgtcaacaaaaatgtgatatgccgtctctatctaacggattaatttccggatctacattttctatcggtggcgttatacatcttagttgtaaaagtggttttacactaacggggtctccatcatccacatgtatcgacggtaaatggaatcccatactcccaatatgtgtacgaactaacgaaaaatttgatccagtggatgatggtcccgacgatgagacagatttgagcaaactctcgaaagacgttgtacaatatgaacaagaaatagaatcgttagaagcaacttatcatataatcatagtggcgttgacaattatgggcgtcatatttttaatctccgttatagtattagtttgttcctgtgacaaaaataatgaccaatataagttccataaattgctaccgtaaatataaatccgttaaaataattaataatttaataacaaacaagtatcaaaagattaaagacttatagctagaatcaattgagatgtcttcttcagtggatgttgatatctacgatgccgttagagcatttttactcaggcactattataacaagagatttattgtgtatggaagaagtaacgccatattacataatatatacaggctatttacaagatgcgccgttataccgttcgatgatatagtacgtactatgccaaatgaatcacgtgttaaacaatgggtgatggatacacttaatggtataatgatgaatgaacgcgatgtttctgtaagcgttggcaccggaatactattcatggaaatgtttttcgattacaataaaaatagtatcaacaatcaactaatgtatgatataattaatagcgtatctataattctagctaatgagagatatagaagcgcttttaacgacgatggtatatacatccgtagaaatatgattaacaagttgtacggatacgcatctctaactactattggcacgatcgctggaggtgtttgttattatctgttgatgcatctagttagtttgtataaataattatttcaatatactagttaaaattttaagattttaaatgtataaaaaactaataacgtttttatttgtaataggtgcattagcatcctattcgaataatgagtacactccgtttaataaactgagtgtaaaactctatatagatggagtagataatatagaaaattcatatactgatgataataatgaattggtgttaaattttaaagagtacacaatttctattattacagagtcatgcgacgtcggatttgattccatagatatagatgttataaacgactataaaattattgatatgtataccattgactcgtctactattcaacgcagaggtcacacgtgtagaatatctaccaaattatcatgccattatgataagtacccttatattcacaaatatgatggtgatgagcgacaatattctattactgcagagggaaaatgctataaaggaataaaatatgaaataagtatgatcaacgatgatactctattgagaaaacatactcttaaaattggatctacttatatatttgatcgtcatggacatagtaatacatattattcaaaatatgatttttaaaaatttaaaatatattatcacttcagtgacagtagtcaaataacaaacaacaccatgagatatattataattctcgcagttttgttcattaatagtatacatgctaaaataactagttataagtttgaatccgtcaattttgattccaaaattgaatggactggggatggtctatacaatatatcccttaaaaattatggcatcaagacgtggcaaacaatgtatacaaatgtaccagaaggaacatacgacatatccgcatttccaaagaatgatttcgtatctttctgggttaaatttgaacaaggcgattataaagtggaagagtattgtacgggactatgcgtcgaagtaaaaattggaccaccgactgtaacattgactgaatacgacgaccatatcaatttgtacatcgagcatccgtatgctactagaggtagcaaaaagattcctatttacaaacgcggtgacatgtgtgatatctacttgttgtatacggctaacttcacattcggagattctaaagaaccagtaccatatgatatcgatgactacgattgcacgtctacaggttgcagcatagactttgtcacaacagaaaaagtgtgcgtgacagcacagggagccacagaagggtttctcgaaaaaattactccatggagttcgaaagtatgtctgacacctaaaaagagtgtatatacatgcgcaattagatccaaagaagatgttcccaatttcaaggacaaaatggccagagttatcaagagaaaatttaatacacagtctcaatcttatttaactaaatttctcggtagcacatcaaatgatgttaccacttttcttagcatgcttaacttgactaaatattcataactaatttttattaatgatacaaaaacgaaataaaactgcatattatacactggttaacgcccttataggctctaaccattttcaagatgaggtccctgattatagtccttctgttcccctctatcatctactccatgtctattagacgatgtgagaagactgaagaggaaacatggggattgaaaatagggttgtgtataattgccaaagatttctatcccgaaagaactgattgcagtgttcatctcccaactgcaagtgaaggattgataactgaaggcaatggattcagggatatacgaaacaccgataaattataaaaaaagcaatgtgtccgctgtttccgttaataatactattttcgtaactggcggattattcataaataactctaatagcacgatcgtggttaacaatatggaaaaacttgacatttataaagacaaacaatggtcgattatagaaatgcctatggctagggtatatcacggcattgactcgacatttggaatgttatattttgccggaggtctatccgttaccgaacaatatggtaatttagagaaaaacaacgagatatcttgttacaatcctagaacgaataagtggtttgatatttcatatactatttataagatatccatatcatcattgtgtaaactaaataacgtcttctatgtatttagtaaggacattggatatgtggaaaagtatgatggtgcatggaagttagtacatgatcgtctccccgctataaaggcattatcaacttctccttattgattgaaaatgaaaatataaatagtttttatgtatagcagtattaccctatagttttattgcttactactaacatggatacagatgttacaaatgtagaagatatcataaatgaaatagatagagagaaagaagaaatactaaaaaatgtagaaattgaaaataataaaaacattaacaagaatcatcccaatgaatatattagagaagcactcgttattaataccagtagtaatagtgattccattgataaagaagttatagaatgtatcagtcacgatgtaggaatatagatcatatctactaatttttataatcgatacaaaacataaaaaacaactcgttattacatagcaggcatggaatccttcaagtattgttttgataacgatggcaagaaatggattatcggaaatactttatattctggtaattcaatactctataaggtcagaaaaaatttcactagttcgttctacaattacgtaatgaagatagatcacaaatcacacaagccattgttgtctgaaatacgattctatatatctgtattggatcctttgactatcgacaactggacacgggaacgtggtataaagtatttggctattccagatctgtatggaattggagaaaccgatgattatatgttcttcgttataaagaattcgggaagagtattcgccccaaaggatactgaatcagtcttcgaagcatgcgtcactatgataaacacgttagagtttatacactctcgaggatttacccatggaaaaatagaaccgaggaatatactgattagaaataaacgtctttcactaattgactattctagaactaacaaactatacaagagtggaaactcacatatagattacaacgaggacatgataacttcaggaaatatcaattatatgtgtgtagacaatcatcttggagcaacagtttcaagacgaggagatttagaaatgttgggatattgcatgatagaatggttcggtggcaaacttccatggaaaaacgaaagtagtataaaagtaataaaacaaaaaaaagaatataaaaaatttatagctactttctttgaggactgttttcctgaaggaaatgaacctctggaattagttagatatatagaattagtatacacgttagattattctcaaactcctaattatgacagactacgtaaactgtttatacaagattgaaattatattcttttttttatagagtgtggtagtgttacggatatctaatattaatattagactatctctatcgcgctacacgaccaatatcgattactatggatatcttctatgaaaggagagaatgtatttatttctccagcgtcaatctcgtcagtattgacaatactgtattatggagctaatggatccactgctgaacagctatcaaaatatgtagaaacggaggagaacacggataaggttagcgctcagaatatctcattcaaatccatgaataaagtatatgggcgatattctgccgtgtttaaagattcctttttgagaaaaattggcgataagtttcaaactgttgacttcactgattgtcgcactatagatgcaatcaacaagtgtgtagatatctttactgaggggaaaatcaatccactattggatgaaccattgtctcctagcaattagtgccgtatactttaaagcaaaatggttgacgccattcgaaaaggaatttaccagtgattatcccttttacgtatctccgacggaaatggtagacgtaagtatgatgtctatgtacggcaaggcatttaatcacgcatctgtaaaagaatcattcggcaacttttcaatcatagaactgccatatgttggagatactagtatgatggtcattcttccagacaagattgatggattagaatccatagaacaaaatctaacagatacaaattttaagaaatggtgtgactttatggatgctatgtttatagatgttcacattcccaagtttaaggtaacaggctcgtataatctggtggatactctagtaaagtcaggactgacagaggtgttcggttcaactggagattatagcaatatgtgtaatttagatgtgagtgtcgacgctatgatccacaaaacgtatatagatgtcaatgaagagtatacagaagcagctgcagcaacttctgtactagtggcagactgtgcatcaacaattacaaatgagttctgtgcagatcatccgttcatctatgtgattaggcatgttgatggaaaaattcttttcgttggtagatattgctctccgacaactaattgttaaccattttttttaaaaaaaatagaaaaaacatgtggtattagtgcaggtcgttgttcttccaattgcaattggtaagatgacggccaactttagtacccacgtcttttcaccacagcactgtggatgtgacagactgaccagtattgatgacgtcaaacaatgtttgactgaatatatttattggtcgtcctatgcataccgcaacaggcaatgcgctggacaattgtattccacactcctctcttttagagatgatgcggaattagtgttcatcgacattcgcgagctggtaaaaaatatgccgtgggatgatgtcaaagattgtacagaaatcatccgttgttatataccggatgagcaaaaaaccatcagagagatttcggccatcatcggactttgtgcatatgctgctacttactggggaggtgaagaccatcccactagtaacagtctgaacgcattgtttgtgatgcttgagatgctaaattacgtggattataacatcatattccggcgtatgaattgatgagttgtacatcttgacattttctttcttctcttctccctttcttctcttctcccttcctccctcttctccctttcccagaaacaaacttttttacccactataaaataaaatgagtatactacctattatatttcttcctatatttttttattcttcattcgttcagacttttaacgcgtctgaatgtatcgacaaagggcaatattttgcatcattcatggagttagaaaacgagccagtaatcttaccatgtcctcaaataaatacgctatcatccggatataatatattagatattttatgggaaaaacgaggagcggataatgatagaattataccgatagataatggtagcaatatgctaattctgaacccgacacaatcagactctggtatttatatatgcattaccacgaacgaaacctactgtgacatgatgtcgttaaatttgacaatcgtgtctgtctcagaatcaaatatagatcttatctcgtatccacaaatagtaaatgagagatctactggcgaaatggtatgtcccaatattaatgcatttattgctagtaacgtaaacgcagatattatatggagcggacatcgacgccttagaaataagagacttaaacaacggacacctggaattattaccatagaagatgttagaaaaaatgatgctggttattatacatgtgttttagaatatatatacggtggcaaaacatataacgtaaccagaattgtaaaattagaggtacgggatagaataataccttctactatgcaattaccagatggcattgtaacttcaataggtagtaatttgactattgcatgcagagtatcgttgagacctcccacaacggacaccgacgtcttttggataagtaatggtatgtattacgaagaagatgatggggacggaaacggtagaataagtgtagcaaataaaatctatatgaccgataagagacgtgttattacatcccggttaaacattaatcctgtcaaggaagaagatgctacaacgtttacgtgtatggcgtttactattcctagcatcagcaaaacagttactgttagtataacgtgaatgtatgttgttacatttccatgtcaattgagtttataagaatttttatacattatcttccaacaaacaattgacgaacgtattgctatgattaactcccacgatactatgcatattattaatcattaacttgcagactatacctagtgctattttgacatactcgtgttcttgtgtaattgcggtatctatattattaaagtacgtaaatctagctatagttttattatttaattttagataatataccgtctccttatttttaaaaattgccacatcctttattaaatcatgaatgggaatttctatgtcatcgttagtatattgtgaacaacaagagcagatatctataggaaagggtggaatgcgatacattgatctatgtagttttaaaacacacgcgaactttgaagaatttatataaatcattccatcgatacatccttctatgttgacatgtatatatccaggaattcttttattaatgtcaggaaatgtataaactaaaacattgcccgaaagcggtgcctctatctgcgttatatccgttcttaacttacaaaatgtaaccaatacctttgcatgacttgttttgttcggcaacgttagtttaaacttgacgaatggattaattacaatagcatgatccgcgcatctattaagtttttttactttaacgcccttgtatgtttttacagagactttatctaaatttctagtgcttgtatgtgttataaatataacgggatatagaaccgaatcacctaccttagatacccaattacattttatcagatccagataataaacaaattttgtcgccctaactaattctatattgttatatattttacaattggttatgatatcatgtaataacttggagtctaacgcgcatcgtcgtacgtttatacaattgtgatttagtgtagtatatctacacatgtatttttccgcactatagtattctggactagtgataaaactatcgttatatctgtcttcaatgaactcatcgagatattgctctctgtcatattcatacacctgcataaactttctagacatcttacaatccgtgttattttaggatcatatttacatatttacgggtatatcaaagatgttagattagttaatgggaatcgtctataataatgaatattaaacaattatatgaggacttttaccacaaagcatcataaaaatgagtcgtcgtctgatttatgttttaaatatcaaccgcaaatcaactcataaaatacaagagaatgaaatatatacatattttagtcattgcaatatagaccatacttctacagaacttgattttgtagttaaaaactatgatctaaacagacgacaacctgtaactgggtatactgcactacactgctatttgtataataattactttacaaacgatgtactgaagatattattaaatcatgacgtaaatgtaacgatgaaaaccagtagcggacgtatgcctgtttatatattgcttactagatgttgtaatatttcacatgatgtagtgatagatatgatagacaaagataaaaaccacttattacatagagactattccaacctattactagagtatataaaatctcgttacatgttattgaaggaagaggatatcgatgagaacatagtatccactttattagataagggaatcgatcctaactttaaacaagacggatatacagcgttacattattattatttgtgtctcgcacacgtttataaactaggtgagtgtagaaaaccgataacgataaaaaaggccaagcgaattatttctttgtttatacaacatggagctaatctaaacgcgttagataattgtggtaatacaccattccatttgtatcttagtattgaaatgtgtaataatattcatatgactaaaatgctgttgacttttaatccgaatttcaaaatatgtaataatcatggattaacgcctatactatgttatataacttccgactacatacaacacgatattcttgttatgttaatacatcactatgaaacaaatgttggagaaatgccgatagatgagcgtcgtatgatcgtattcgagtttatcaaaacatattctacacgtccggcagattcgataacttatttgatgaataggtttaaaaatataaatatttatacccgctatgaaggaaagacattattacacgtagcatgtgaatataataatacacaagtaatagattatcttatacgtatcaacggagatataaatgcgttaaccgacaataacaaacacgctacacaactcattatagataacaaagaaaattccccatataccattaattgtttactgtatatacttagatatattgtagataagaatgtgataagatcgttggtggatcaacttccatctctacctatcttcgatataaaatcatttgagaaattcatatcctactgtatacttttagatgacacattttacgataggcacgttaagaatcgcgattctaaaacgtatcgatacgcattttcaaaatacatgtcgtttgataaatacgatggtataataactaaatgtcacgacgaaacaatgttactcaaactgtccactgttctagacactacactatatgcagttttaagatgtcataattcgagaaagttaagaagatacctcaacgagttaaaaaaatataataacgataagtcctttaaaatatattctaatattatgaatgagagataccttaatgtatattataaagatatgtacgtgtcaaaggtatatgataaactatttcctgttttcacagataaaaattgtctactaacattactaccttcagaaattatatacgaaatattatacatgctgacaattaacgatctttataatatatcgtatccacctaccaaagtatagttgtatttttctcatgcgatgtgtgtaaaaaaactgatattatataaatattttagtgccgtataataaagatgacgatgaaaatgatggtacatatatatttcgtatcattattgttattgctattccacagttacgccatagacatcgaaaatgaaatcacagaattcttcaataaaatgagagatactctaccagctaaagactctaaatggttgaatccagcatgtatgttcggaggcacaatgaatgatatagccgctctaggagagccattcagcgcaaagtgtcctcctattgaagacagtcttttatcgcacagatataaagactatgtggttaaatgggagaggctagaaaagaatagacggcgacaggtttctaataaacgtgttaaacatggtgatttatggatagccaactatacatctaaattcagtaaccgtaggtatttgtgcaccgtaactacaaagaatggtgactgtgttcagggtatagttagatctcatattaaaaaacctccttcatgcattccaaaaacatatgaactaggtactcatgataagtatggcatagacttatactgtggaattctttacgcaaaacattataataatataacttggtataaagataataaggaaattaatatcgacgacattaagtattcacaaacgggaaaggaattaattattcataatccagagttagaagatagcggaagatacgactgttacgttcattacgacgacgttagaatcaagaatgatatcgtagtatcaagatgtaaaatacttacggttataccgtcacaagaccacaggtttaaactaatactagatccgaaaatcaacgtaacgataggagaacctgccaatataacatgcactgctgtgtcaacgtcattattgatcgacgatgtactgattgaatgggaaaatccatccggatggcttataggattcgattttgatgtatactctgttttaactagtagaggcggtatcaccgaggcgaccttgtactttgaaaatgttactgaagaatatataggtaatacatataaatgtcgtggacacaactattattttgaaaaaacccttacaactacagtagtattggagtaaatatacaatgcatttttatatacattactgaattattattactgaattattattactgaattattattaattatatcgtatttgtgctatagaatggatgaagatacgcgactatctaggtatttgtatctcaccgatagagaacatataaatgtagactctattaaacagttgtgtaaaatatcagatcctaatgcatgttatagatgtggatgtacggctttacatgagtacttttataattatagatcagtcaacggaaaatacaagtatagatacaacggttactatcaatattattcatctagcgattatgaaaattataatgaatattattatgatagaactggtatgaacagtgagagtgataatatatcaatcaaaacagaatatgaattctatgatgaaacacaagatcaaagtacacaactagtaggttacgacattaaactcaaaaccaatgaggatgattttatggctatgatagatcagtgggtgtccatgattatatagatgaatcaattaataaagtagtatatggaagagagtctcacgtaagatggcgggatatatggcaagaacataatgatggcgtatacagtataggaaaggagtgcatagataatatatacgaagacaaccataccgtagacgaattctacaagatagacagcgtatcagatgtagatgacgcggaacacatatctccgataactaaaaaaccatagaatcagttgatgataatacctacatttctaatcttccgtataccatcaaatacaaaatattcgagcaacaataagtattttttatacctttaaaactgataaataaattttttctagtgatattttggcaagatgagaatcctatttctcatcgctttcatgtatgggtgtgttcactcatatgttaacgcggttgaaaccaaatgtccaaatctagacattgtaacatcttctggagaatttcattgttcaggatgtgtggaacatatgcctgagtttagctatatgtattggttggcaaaggatatgaaatcggacgaggataccaagtttatagaacatctgggtgatggcatcaaagaagatgaaaccgttcgtaccacagatagtggaatcgtcactctacgtaaagtccttcatgtgactgatactaataaatttgataattataggttcacttgtgtcctcgctacgctagatggcatttataaaaagaatgtttgctgaagtagttgtgtgctactatttttatttatgatataatctaatggaattaatttgaattgatatttatccaatactaaagattatattagaatcaaattaatcttttatacgagaaaaaataacgacatacgtcgtcaacaaattaaactttttatttattagttaactagcttatagaacttgctcattgttatgtttctaaaacgggtacggcatataggacaattatccgacgcaccggtttctcttcgtgttctatgccatatattgatgcatgttatgcaaaatatatgagtacacgaatccaataaaccaaagtatctatcgttttgagtaaacaacttcatagcaaattccacattctttttctttacttactctatacacgtcctcgtatttatttagtattttgatgatatccaactcagaaatggttgttgtattattgggtgtatttggagtataggtattattagctatgtaccaatttaccaaccctcttaatattgattgataatcacatcggttatccaattaataactaaattgtagtgtatatatagaccatatatgtttctatttttttgacagttacgtatagtttcagtaagttttgattgttgtattcctgtatctctagataagttagtcatatagtcccttccggcgatacgttttttccaagcccgaaattgattagccaaatgtgtatttatttttgtgatattgatataatatttcggataatgcatactgttagtcttatatcatttggttcatctatgtattgtaatattgttacatgatctatagatgatgtattgattttggcaggatcgaattccatatccgcgactaaacagtgaaaaaaatgtaaatactttttaaattttaaattagtaaaacttttttttattttttatgattccaaaaatactgaatacaaagtcctaaattataaatatggagatcatactaccacaacttattattatgtatacaaggccggtgtaatagatagatatatataattctattacaccggcagacaattaccgaccggtatttgtcgttaccaacataccgtataatatgtaatatacaattccataacccattgacagttgttatacatcaaaattgcaattcttttgattacgatgttataagaatgtagttaattgatgtatgatgttaatgtgtcctctttcctcttataacatcgtaatcaaaaacttttttataatatatacctaataatgtgtcttaatagttctcgtgattcgtcaaacaatcattcttataaaatataataaagcaacgtaaaaacacataaaaataagcgtaactaataagacaatggatatttacgacgataaaggtctacagactattaaactgtttaataatgaatttgattgtataaggaatgacatcagagaattatttaaacatgtaactgattccgatagtatacaacttccgatggaagacaattctgatattatagaaaatatcagaaaaatactatatagacgattaaaaaatgtagaatgtgttgacatcgataacacaataacttttatgaaatacgatccaaatgatgataataagcgtacgtgttctaattgggtacccttaactaataactatatggaatattgtctagtaatatatttggaaacaccgatatgtggaggcaaaataaaattataccaccctacaggaaatataaagtcggataaggatattatgtttgcaaagactctagactttaaatcaacgaaagtgttaactggacgtaaaacaattgccgttctagacatatccgtttcatataatagatcaatgactactattcactacaacgacgacgttgatatagatatacatactgataaaaatggaaaagagttatgttattgttatataacaatagatgatcattacttggttgatgtggaaactataggagttatagtcaatagatctggaaaatgtctgttagtaaataaccatctaggtataggtatcgttaaagataaacgtataagcgatagttttggagatgtatgtatggatacaatatttgacttttctgaagcacgagagttattttcattaactaatgatgataacaggaatatagcatgggacactgataaactagacgatgatacagatatatggactcccgtcacagaagatgattacaaatttctttctagactagtattgtatgcaaaatctcaatcggatactgtatttgactattatgttcttactggtgatacggaaccacccactgtattcattttcaaggtaactagattttactttaatatgccgaaataaaaaatttttgtataatatctagaggtagaggtattgtttagataaatacaaataacatagatacatcgcatacttagcatttttataaatatacataagacatacactttatacatttttgtaaaaatactcataaaaaaatttataaaaattatggcacaaccatatcttgtataggtagtttagttcgtcgagtgaacctataaacagataatagacaacacataataatgcctactaatacaagcataataccgggagatgggatatatgacgttgtagtgtttgggttttctgaacgttgatagtctactaatactacatgctgacatctaatgcctgtataaccatgagagcatctacaatacataccgtcaatatctctagcgtggatacagtcaccgtgtaaacaatatccatctccctctggaccgcataatctgatagctggaatatctgttgtagcgtttgtaatttctggcaatgtcgtttcgatagcgttaccactatcggcgaatgatctgattatcatagcagcgaacaacaacatcagataatttatcaacatttttgatggattctgtgtttatgctgtttctcagtgtgtgtttatgacaagattgggaattttatattattaattcagtaatataaactaataatatattgttaattgtgtaaataatataaaaataacaatacaatattgaatgtgttgctgttaaaaatgtatgtgttaatataatagaataaaataaatgagtatgatcattttagataacgattgattttatcattaccgcttcattcttatattctttgcttacggaacctatatttagaaacatctactaacaattttttatgcttgcattattaatggtatgtaatatgattgattgtgtacgcaataccaatttgttaagtatgaatacggggtacaaacataaattgaaatttaacattatttatttatgatatatatcgttatcgttaggtctataccatggatatctttaaagaactaatcttaaaacaccctgatgaaaatgttttgatttctccagtttccattttatctactttatctattctaaatcatggagcagctggttctacagctgaacaactatcaaaatatatagagaatatgaatgagaatacacccgatgacaataatgatgacatggaggtagatattccgtattgtgcgacactagctaccgcaaataaaatatacggtagcgatagtatcgagttccacgcctccttcctacaaaaaataaaagacgattttcaaactgtaaactttaataatgctaaccaaacaaaggaactaatcaacgaatgggttaagacaatgacaaatggtaaaattaattccttattgactagtccgctatccattaatactcgtatgacagttgttagcgccgtccattttaaagcaatgtggaaatatccattttctaaacatcttacatatacagacaagttttatatttctaagaatatagttaccagcgttgatatgatggtgggtaccgagaataacttgcaatatgtacatattaatgaattattcggaggattctctattatcgatattccatacgagggaaactctagtatggtaattatactaccggacgacatagaaggtatatataacatagaaaaaaatataacagatgaaaaatttaaaaaatggtgtggtatgttatctactaaaagtatagacttgtatatgccaaagtttaaagtggaaatgacagaaccgtataatctggtaccgattttagaaaatttaggacttactaatatattcggatattatgcagattttagcaagatgtgtaatgaaactatcactgtagaaaaatttctacatacgacgtttatagatgttaatgaggagtatacagaagcatcggccgttacaggagtatttacgattaacttttcgatggtatatcgtacgaaggtctacataaaccatccattcatgtacatgattaaagacaccacaggacgtatactttttatagggaaatactgctatccgcaataaatataaacaaatagacttttataaagagtcttcaacgataagtatatcgacatactacttatgctgcgaaagattctgaacgagaacgactatctcaccctcttggatcatatccgcactgctaaatactaaatctccactacactttttatcatcttatgaggaatgattgccttcgtgaaataggaataattagcaccagaatagctatggattattgtggtagagagtgcactattctatgtcgtctactggatgaagatgtgacgtacaaaaaaataaaactagaaattgaaacgtgtcacaacttatcaaaacatatagatagacgaggaaacaatgcgctacattgttacgtctccaataaatgcgatacagacattaagattgttctctcgcggagtcgagagactttgtagaaacaacgaaggattaactccgctaggagtatacagtaagcatagatacgtaaaatctcagattgtgcatctactgatatccagctattcaaattcctctaacgaactcaagtcgaatataaatgatttcgatctgtattcggataatatcgacttacgtctgctaaaatacctaattgtggataaacggatacgtccgtccaagaatacgaattatgcaatcaatggtctcggattggtggatatatacgtaacgacgcctaatccgagaccagaagtattgctatggcttcttaaatcagaatgttacagcaccggttacgtatttcgtacctgtatgtacgacagtgatatgtgtaagaactctcttcattactatatatcgtctcatagagaatctcaatctctatccaaggatgtaattaaatgtttgatcgataacaatgtttccatccatggcagagacgaaggaggatctttacccatccaatactactggtctttctcaaccatagatatagagattgttaaattattattaataaaggatgtggacacgtgtagagtatacgacgtcagccctatattagaggcgtattatctaaacaagcgatttagagtaaccccatataatgtagacatggaaatcgttaatcttcttattgagagacgtcatactcttgtcgacgtaatgcgtagtattacttcgtacgattccagagaatataaccactacatcatcgataacattctaaagagatttagacaacaggatgaatccatcgtacaagccatactgataaactacttacattacggcgatatggtcgttcgatgcatgttagataacggacaacaactatcctctacacgactactttgttaataataatctcgtcgatgtaaacgtcgtaaggtttatcgtggaaaatatggacacgcggctgtaaatcacgtatcgaacaatggccgtctatgtatgtacggtctgatattatcgagatttaataattgcgggtatcactgttatgaaaccatactgatagatgtatttgatatactaagcaagtacatggatgatatagatatgatcgataactctactatattacgcggtcgatgtcaataatatacaatttgcaaagcggttattggaatatggagcgagtatcacgctcgataatcaatacggccatccagaaaagcagttacagaagagaaaacaaaacgaaatcgttgttctacaagatgtctctccctacgacgattactacgtaaaaaagatactagcctactgcctattaagggacgagtcattcgcggaactacatagtaaattctgtttaaacgaggactataaaagtgtatttatgaaaaatatatcattcgataagatagattccatcatcgtgacataagtcgcctcaaagagattcgaatctccgacaccgacctgtatacggtatcacagctatcttaaagccatacattcagacagtcacatttcatttcccatgtacgacgatctcatagaacagtgccatctatcgatggagcgtaaaagtaaactcgtcgacaaagcactcaataaattagagtctaccatcggtcaatctagactatcgtatttgcctccggaaattatgcgcaatatcatctaaacagtatgttgtacggaaagaaccattacaaatattatccatgatagaaagaaaatatctatatgattggagaagtaggaaacaggaacaagacaacgattactacattattaaatcatgaagtccgtattatactcgtatatattgtttctctcatgtataataataaacggaagagatatagcaccgcatgcaccatccgatggaaagtgtaaagacaacgaatacaaacgccataatttgtgtccgggaacatacgcttccagattatgcgatagcaagactaacacacgatgtacgccgtgtggttcgggtaccttcacatctcgcaataatcatttacccgcttgtctaagttgtaacggaagacgcgatcgtgtaacacgactcacaatagaatctgtgaatgctctcccggatattattgtcttctcaaaggatcatccggatgcaaggcatgtgtttcccaaacaaaatgtggaataggatacggagtatccggagacgtcatctgttctccgtgtggtctcggaacatattctcacaccgtctcttccgcagataaatgcgaacccgtacccagaaatacgtttaactatatcgatgtggaaattaacctgtatccagttaacgacacgtcgtgtactcggacgaccactaccggtctcagcgaatccatctcaacgtcggaactaactattactatgaatcataaagactgtaatcccgtatttcgtgatggatacttctccgttcttaataaggtagcgacttcaggtttctttacaggagaaaggtgtgcactctgaatttcgagattaaatgcaataacaaagattcttcctccaaacagttaacgaaagcaaagaatgatactatcatgccgcattcggagacagtaactctagtgggcgacatctatatactatatagtaataccaatactcaagactacgaaactgatacaatctcttatcatgtgggtaatgttctcgatgtcgatagccatatgcccggtagttgcgatatacataaactgatcactaattccaaacccacccactttttatagtaagtttttcacccataaataataaatacaataattaatttctcgtaaaagtagaaaatatattctaatttattgcacggtaaggaagtagaatcataaagaacagtactcaatcaatagcaattatgaaacaatatatcgtcctggcatgcatgtgcctggcggcagctgctatgcctgccagtcttcagcaatcatcctcatcctcctcctcgtgtacggaagaagaaaacaaacatcatatgggaatcgatgttattatcaaagtcacaaagcaagaccaaacaccgaccaatgataagatttgccaatccgtaacggaaattacagagtccgagtcagatccagatcccgaggtggaatcagaagatgattccacatcagtcgaggatgtagatcctcctaccacttattactccatcatcggtggaggtctgagaatgaactttggattcaccaaatgtcctcagattaaatccatctcagaatccgctgatggaaacacagtgaatgctagattgtccagcgtgtccccaggacaaggtaaggactctcccgcgatcactcatgaagaagctcttgctatgatcaaagactgtgaagtgtctatcgacatcagatgtagcgaagaagagaaagacagcgacatcaagacccatccagtactcgggtctaacatctctcataagaaagtgagttacgaagatatcatcggttcaacgatcgtcgatacaaaatgcgtcaagaatctagagtttagcgttcgtatcggagacatgtgcaaggaatcatctgaacttgaggtcaaggatggattcaagtatgtcgacggatcggcatctgaaggtgcaaccgatgatacttcactcatcgattcaacaaaactcaaagcgtgtgtctgaatcgataactctattcatctgaaattggatgagtagggttaatcgaacgattcaggcacaccacgaattaaaaaagtgtaccggacactatattccggtttgcaaaacaaaaatgttcttaactacattcacaaaaagttacctctcgcgacttcttctttttctgtctcaatagtgtgatacgattatgacactattcctattcctattcctatttcctttcagagtatcacaaaaatattaaacctctttctgatggtctcataaaaaaagttttacaaaaatatttttattctctttctctctttgatggtctcataaaaaaagttttacaaaaatatttttattctctttctctctttgatggtctcataaaaaaagttttacaaaaatatttttattctctttctctctttgatggtctcataaaaaaagttttacaaaaatatttttattctctttctctctttgatggtctcataaaaaaagttttacaaaaatatttttattctctttctctctttgatggtctcataaaaaaagttttacaaaaatatttttattctctttctctctttgatggtctcataaaaaaagttttacaaaaatatttttattctctttctctctttgatggtctcataaaaaaagttttacaaaaatatttttattctctttctctctttgatggtctcataaaaaaagttttacaaaaatatttttattctctttctctctttgatggtctcataaaaaaagttttacaaaaatatttttattctctttctctctttgatggtctcataaaaaaagttttacaaaaatatttttattctctttctctctttgatggtctcataaaaaaagttttacaaaaatatttttattctctttctctctttgatggtctcataaaaaagttttacaaaaatatttttattctctttctctctttgatggtctcataaaaaagttttacaaaaatatttttattctctttctctctttgatggtctcataaaaaaagttttacaaaaatatttttattctctttctctctttgatggtctcataa

SEQ ID NO: 24 - protein, 235 aa, Artificial Sequence
  TurboFP635
MVGEDSVLITENMHMKLYMEGTVNDHHFKCTSEGEGKPYEGTQTMKIKVVEGGPLPFAFDILATSFMYGSKTFINHTQGIPDFFKQSFPEGFTWERITTYEDGGVLTATQDTSLQNGCLIYNVKINGVNFPSNGPVMQKKTLGWEASTEMLYPADSGLRGHSQMALKLVGGGYLHCSLKTTYRSKKPAKNLKMPGFYFVDRRLERIKEADKETYVEQHEMAVARYCDLPSKLGHS

SEQ ID NO: 25 - DNA, 184241 bp, Artificial Sequence
  GLV-2b372
tttttttatgagaccatcaaagagagaaagagaataaaaatatttttgtaaaactttttttatgagaccatcaaagagagaaagagaataaaaatatttttgtaaaactttttttatgagaccatcaaagagagaaagagaataaaaatatttttgtaaaactttttttatgagaccatcaaagagagaaagagaataaaaatatttttgtaaaactttttttatgagaccatcaaagagagaaagagaataaaaatatttttgtaaaactttttttatgagaccatcaaagagagaaagagaataaaaatatttttgtaaaactttttttatgagaccatcaaagagagaaagagaataaaaatatttttgtaaaactttttttatgagaccatcaaagagagaaagagaataaaaatatttttgtaaaactttttttatgagaccatcaaagagagaaagagaataaaaatatttttgtaaaactttttttatgagaccatcaaagagagaaagagaataaaaatatttttgtaaaactttttttatgagaccatcagaaagaggtttaatatttttgtgatactctgaaaggaaataggaataggaataggaatagtgtcataatcgtatcacactattgagacagaaaaagaagaagtcgcgagaggtaactttttgtgaatgtagttaagaacatttttgttttgcaaaccggaatatagtgtccggtacacttttttaattcgtggtgtgcctgaatcgttcgattaaccctactcatccaatttcagatgaatagagttatcgattcagacacacgctttgagttttgttgaatcgatgagtgaagtatcatcggttgcaccttcagatgccgatccgtcgacatacttgaatccatccttgacctcaagttcagatgattccttgcacatgtctccgatacgaacgctaaactctagattcttgacacattttgtatcgacgatcgttgaaccgatgatatcttcgtaactcactttcttatgagagatgttagacccgagtactggatgtcgctgtctttctcttcttcgctacatctgatgtcgatagacacctcacagtctttgatcatagcaagagcttcttcatgagtccttaccttgtcctggggacacgctggacaatctagcattcactgtgtttccatcagcggattctgagatggatttaatctgaggacatttggtgaatccaaagttcattctcagacctccaccgatgatggagtaataagtggtaggaggatctacatcctcgactgatgtggaatcatcttctgattccacctcgggatctggatctgactcggactctgtaatttccgttacggattggcaaatcttatcattggtcggtgtttggtcttgctttgtgactttgataataacatcgattcccatatgatgtttgttttcttcttccgtacacgaggaggaggatgaggatgattgctgaagactggcaggcatagcagctgccgccaggcacatgcatgccaggacgatatattgtttcataattgctattgattgagtactgttctttatgattctacttccttaccgtgcaataaattagaatatattttctacttttacgagaaattaattattgtatttattatttatgggtgaaaaacttactataaaaagtgggtgggtttggaattagtgatcagtttatgtatatcgcaactaccgggcatatggctatcgacatcgagaacattacccacatgataagagattgtatcagtttcgtagtcttgagtattggtattactatatagtatatagatgtcgcccactagagttactgtctccgaatgcggcatgatagtatcattctttgctttcgttaactgtttggaggaagaatctttgttattgcatttaatctcgaaattcagagtgcacacctttctcctgtaaagaaacctgaagtcgctaccttattaagaacggagaagtatccatcacgaaagacgggattacagtctttatgattcatagtaatagttagttccgacgttgagatggattcgctgagaccggtagtggtcgtccgagtacacgacgtgtcgttgacgggatacaggttaatttccacatcgatatagttaaaggtatttctgggtacgggttcgcatttatctgcggaagagacggtgtgagaatatgttccgagaccacacggagaacagatgacgtctccggatactccgtatcctattccacattttgtttgggaaacacatgccttgcatccggatgatcctttgagaagacaataatatccgggagagcattcacagattctattgtgagtcgtgttacacgatcgcgtcttccgttacaacttagacaagcgggtaaatgattattgcgagatgtgaaggtacccgaaccacacggcgtacattgtgtgttagtcttgctatcgcataatctggaagcgtatgttcccggacacaaattatggcgtttgtattcgttgtctttacactttccatcggatggtgcatgcggtgctatatctcttccgtttattattatacatgagagaaacaatatatacgagtataatacggacttcatgatttaataatgtagtaatcgtcgtcttgttcctgtttcctacttctccaatcatatagatattttctttctatcatggataatatttgtaatggttctttccgtacaacatactgtttagatgatattgcgcataatttccggaggcaaatacgatagtctagattgaccgatggtagactctaatttattgagtgctttgtcgacgagtttacttttacgctccatcgatagatggcactgttctatgagatcgtcgtacatgggaaatgaaatgtgtctgtctgaatgtatggctttaagatagctgtgataccgtatacaggtcggtgtcggagattcgaatctctttaaggcgacttatgtcacgatgatggaatctatcttatcgaatgatatatttttcataaatacacttttatagtcctcgtttaaacagaatttactatgtagttccgcgaatgactcgtcccttaataggcagtaggctagtatcttttttacgtagtaatcgtcgtagggagagacatcttgtagaacaacgatttaatcataggtagagatactttcagtctgtggtggatgatgtcattcacaacatccgccttgtatatgatgtttctgttttcaaacaccaagtcgaataccgtctttagtcggaaggttgatgtcgtatccgatgtatgaggcaacattgttgttacaattttgaaaggcggtattatagtattcgtctttctgaatgtcgaacctatctaatagataccgtagtatattgagagtgtatccttgattatgttttatgaatagataaagtagatgttgtccttcttccttttgttcgtgccaattgagtaacattatgagaatatgacctgttgcacaatcgttccatgatgggtgtacaatcaagattattacgtatcctcgtatcggctcctcgagataaaagagcatacaccacacgaggactatgtttggtatactgttgaaggtaagtgtgtaaccgcgttaatgtttgctccataatctattatcgcgtagatgaatcgcttctcggctcgcatcttagtgtgacttaacttgtaataattgctttcgtagaacgtggatatgtgtttacagtagtaatgaagagaagtgagttcatcctcgtcggcgcaattagggtcggatcctttgtacagaacgtaatagtttaagctcccattgaatttatatctaagataacacagcaatagatcggatgatttactaaagtcatcaatggtgtccgttagtatatcaaagatcttgttatcgattgatagtggtcatccttgctatcaaagttacgcatgccgtggtgtaacaatatctttaatacagatggattaaatcgtgtattcatcgtatagcaatgtaatggagagttacctcgtttattcagatcgcagtgtttaataactagcttaaacagatgagacgatgtatccacatcaaagaacgtaaaatacatatgacagacattgttgacagaaacgtgaccttcattcttaccgtcgtccataaatacgttaggtatgtaccacatactgtcgcgaacgatgcgtacaatctcgtccatctcataatgatttactttttcataattaaagatgtgaaagaaaaccgaacaatatatttttttagtaatgtttatgcgagacatataaaataaactccgtgtttatgatgccggtaaatgtttttatcatcttggacggaatcgattttgtaatatgtcatggaaacaaatgaaacaggacattatcgctccatgataaattatttaatggagtaataaagtatctccatgggtaatttcgaaatcaagttatcgtctgtattaatgttgtccactatggagtcgatcctctcattgttctttacagtttctgtaatgatggacgttagttcttttttgtaccatttgatgtcggattctttgcgtatctcaatttgtggcgtttgcttcgtttaaataatatatcaaacatggagacgcctgatatgtagacattcttcattctattaatgtctactctatagcgctttagttccttatgacgaccggcgatatcatactttactttagaaggaaaatcatcatctaggattaaggcgtatctgatacaggcgaataatggttcaggatatagatagcgtatatctctattaaatgcgtcaatcatagtctctagagtgggatggtaactcagtaataaatcaactagcttcgttttgttttctctttggtaactgcttttctggatggccgtattgattatcgagcgtgacactcgctccatattccaataaccgctttgcaaattgtatattattgacatcgaccgcgtaatatagtagagttatcgatcatatctatatcatccatgtacttgcttagtatatcaaatacatctatcagtatggtttcataacagtgatacccgcaattattaaatctcgataatatcagaccgtacatacatagacggccattgttcgatacgtgatttacagccgcgtgtccatattttccacgataaaccttacgacgtttacatcgacgagattattattaacaaagtagtcgtgcagaggatagttgttgtccgttatctaacatgcatcgaacgaccatatcgccgtaatgtaagtagtttatcaacatggcttgtacatcctgttgtctaaatctctttagaatgttatcgatgatgtagtggttatattctctggaatcgtacgaagtaatactacgcattacgtcgacaagagtatgacgtctctcaataagaagattaacgatttccatgtctacattatatggggttactctaaatcgcttgtttagataatatagggctgacgtcgtatactctacacgtgtccacatcctttattaataataatttaacaatctctatatctatggttgagaaagaccagtagtattggatgggtaaagatcctccttcgtctctgccatggatggaaacattgttatcgatcaaacatttaattacatccttggatagagattgagattctctatgagacgatatatagtaatgaagagagttcttacacatatcactgtcgtacatacaggtacgaaatacgtaaccggtgctgtaacattctgatttaagaagccatagcaatacttctggtctcggattaggcgtcgttacgtatatatccaccaatccgagaccattgattgcataattcgtattcttggacggacgtatccgtttatccacaattaggtattttagcagacgtaagtcgatattatccgaatacagatcgaaatcatttatattcgacttgagttcgttagaggaatttgaatagctggatatcagtagatgcacaatctgagattttacgtatctatgcttactgtatactcctagcggagttaatccttcgttgtttctacaaagtctctcgactccgcgagagaacaatcttaatgtctgtatcgcatttattggagacgtaacaatgtagcgcattgtttcctcgtctatctatatgttttgataagttgtgacacgtttcaatttctagttttatttttttgtacgtcacatcttcatccagtagacgacatagaatagtgcactctctaccacaataatccatagctattctggtgctaattattcctatttcacgaaggcaatcattcctcataagatgataaaaagtgtagtggagatttagtatttagcagtgcggatatgatccaagagggtgagatagtcgttctcgttcagaatctttcgcagcataagtagtatgtcgatatacttatcgttgaagactctttataaaagtctatttgtttatatttattgcggatagcagtatttccctataaaaagtatacgtcctgtggtgtctttaatcatgtacatgaatggatggtttatgtagaccttcgtacgatataccatcgaaaagttaatcgtaaatactcctgtaacggccgatgcttctgtatactcctcattaacatctataaacgtcgtatgtagaaatttttctacagtgatagtttcattacacatcttgctaaaatctgcataatatccgaatatattagtaagtcctaaattttctaaaatcggtaccagattatacggttctgtcatttccactttaaactttggcatatacaagtctatacttttagtagataacataccacaccattttttaaatttttcatctgttatatttttttctatgttatatataccttctatgtcgtccggtagtataattaccatactagagtttccctcgtatggaatatcgataatagagaatcctccgaataattcattaatatgtacatattgcaagttattctcggtacccaccatcatatcaacgctggtaactatattcttagaaatataaaacttgtctgtatatgtaagatgtttagaaaatggatatttccacattgctttaaaatggacggcgctaacaactgtcatacgagtattaatggatagcggactagtcaataaggaattaattttaccatttgtcattgtcttaacccattcgttgattagttcctttgtttggttagcattattaaagtttacagtttgaaaatcgtcttttattttttgtaggaaggaggcgtggaactcgatactatcgctaccgtatattttatttgcggtagctagtgtcgcacaatacggaatatctacctccatgtcatcattattgtcatcgggtgtattctcattcatattctctatatattttgatagttgttcagctgtagaaccagctgctccatgatttagaatagataaagtagataaaatagaaactggagaaatcaaaacattttcatccgtgtgttttaagattagttctttaaagatatccatggtatagaccaaacaataacgataacgatatatatcataaataaataatgttaaatttcagtttatgtttgtaccccgtattcatacttaacaaattggtattgcgtacacaatcaatcatattacataccattaataatgcaagcataaaaaattgttagtagatgtttctaaatataggttccgtaagcaaagaatataagaatgaagcggtaatgataaaatcaatcgttatctaaaatgatcatactcatttattttattctattatattaacacatacatttttaacagcaacacattcaatattgtattgttatttttatattatttacacaattaacaatatattattagtttatattactgaattaataatataaaattcccaatcttgtcataaacacacactgagaaacagcataaacacagaatccatcaaaaatgttgataaattatctgatgttgttgttcgctgctatgataatcagatcattcgccgatagtggtaacgctatcgaaacgacattgccagaaattacaaacgctacaacagatattccagctatcagattatgcggtccagagggagatggatattgtttacacggtgactgtatccacgctagagatattgacggtatgtattgtagatgctctcatggttatacaggcattagatgtcagcatgtagtattagtagactatcaacgttcagaaaacccaaacactacaacgtcatatatcccatctcccggtattatgcttgtattagtaggcattattatgtgttgtctattatctgtttataggttcactcgacgaactaaactacctatacaagatatggttgtgccataatttttataaatttttttatgagtatttttacaaaaatgtataaagtgtatgtcttatgtatatttataaaaatgctaagtatgcgatgtatctatgttatttgtatttatctaaacaatacctctacctctagatattatacaaaaattttttatttcggcatattaaagtaaaatctagttaccttgaaaatgaatacagtgggtggttccgtatcaccagtaagaacataatagtcaaatacagtatccgattgagattttgcatacaatactagtctagaaagaaatttgtaatcatcttctgtgacgggagtccatatatctgtatcatcgtctagtttatcagtgtcccatgctatattcctgttatcatcattagttaatgaaaataactctcgtgcttcagaaaagtcaaatattgtatccatacatacatctccaaaactatcgcttatacgtttatctttaacgatacctatacctagatggttatttactaacagacattttccagatctattgactataactcctatagtttccacatcaaccaagtaatgatcatctattgttatataacaataacataactcttttccatttttatcagtatgtatatctatatcaacgtcgtcgttgtagtgaatagtagtcattgatctattatatgaaacggatatgtctagaacggcaattgttttacgtccagttaacactttcgttgatttaaagtctagagtctttgcaaacataatatccttatccgactttatatttcctgtagggtggtataattttattttgcctccacatatcggtgtttccaaatatattactagacaatattccatatagttattagttaagggtacccaattagaacacgtacgcttattatcatcatttggatcgtatttcataaaagttattgtgttatcgatgtcaacacattctacattttttaatcgtctatatagtatttttctgatattttctataatatcagaattgtcttccatcggaagttgtatactatcggaatcagttacatgtttaaataattctctgatgtcattccttatacaatcaaattcattattaaacagtttaatagtctgtagacctttatcgtcgtaaatatccattgtcttattagttacgcttatttttatgtgtttttacgttgctttattatattttataagaatgattgtttgacgaatcacgagaactattaagacacattattaggtatatattataaaaaagtttttgattacgatgttataagaggaaagaggacacattaacatcatacatcaattaactacattcttataacatcgtaatcaaaagaattgcaattttgatgtataacaactgtcaatgggttatggaattgtatattacatattatacggtatgttggtaacgacaaataccggtcggtaattgtctgccggtgtaatagaattatatatatctatctattacaccggccttgtatacataataataagttgtggtagtatgatctccatatttataatttaggactttgtattcagtatttttggaatcataaaaaataaaaaaaagttttactaatttaaaatttaaaaagtatttacatttttttcactgtttagtcgcggatatggaattcgatcctgccaaaatcaatacatcatctatagatcatgtaacaatattacaatacatagatgaaccaaatgatataagactaacagtatgcattatccgaaatattatatcaatatcacaaaaataaatacacatttggctaatcaatttcgggcttggaaaaaacgtatcgccggaagggactatatgactaacttatctagagatacaggaatacaacaatcaaaacttactgaaactatacgtaactgtcaaaaaaatagaaacatatatggtctatatatacactacaatttagttattaattggataaccgatgtgattatcaatcaatattaagagggttggtaaattggtacatagctaataatacctatactccaaatacacccaataatacaacaaccatttctgagttggatatcatcaaaatactggataaatacgaggacgtgtatagagtaagtaaagaaaaagaatgtggaatttgctatgaagttgtttactcaaaacgatagatactttggtttattggattcgtgtactcatatattttgcataacatgcatcaatatatggcatagaacacgaagagaaaccggtgcgtcggataattgtcctatatgccgtacccgttttagaaacataacaatgagcaagttctataagctagttaactaataaataaaaagtttaatttgttgacgacgtatgtcgttattttttctcgtataaaagattaatttgattctaatataatctttagtattggataaatatcaattcaaattaattccattagattatatcataaataaaaatagtagcacgcactacttcagccaaatattcttttttgaaacgccatctatcgtagtgaggacacaagtgaacctataattatcaaatttattagtatcggttacatgaaggactttacgtagagtgacgattccactatctgtggtacgaacggtttcatcttctttgatgccatcacccagatgttctataaacttggtatcctcgtccgatctcatatcctttgccaaccaatacatgtagctaaaattaggcataaatttcacacatcctgaacaatgaaattctccagaagatgttacaatgtctagatttggacatttggtttcaaccgcgttaacatatgagtgaacacacccatacatgaaagcgatgagaaataggattctcatcttgccaaaatatcactagaaaaaatttatttatcagttttaaaggtataaaaaatacttattgttgctcgaatattttgtatttgatggtatacggaagattagaaatgtaggtattatcatcaactgattctatggttttatgtattctatcatgtttcactattgcgttggaaataatatcatatgcttccacatatattttattttgttttaactcataatactcacgtaattctggattattggcatatctatgaataattttagctccatgatcagtaaatattaatgagaacatagtattaccacctaccattatttttttcatctcattcaattcttaattgcaaagatctatataatcattatagcgttgacttatggactctggaatcttagacgatgtacagtcatctataatcatggcatatttaatacattgttttatagcatagtcgttatctacgatgttagatatttctctcaatgaatcaatcacacaatctaatgtaggtttatgacataatagcattttcagcagttcaatgtttttagattcgttgatggcaatggctatacatgtatatccgttatttgatctaatgttgacatctgaaccggattctagcagtaaagatactagagattgtttattatatctaacagccttgtgaagaagtgtttctcctcgtttgtcaatcatgttaatgtctttaagataaggtaggcaaatgtttatagtactaagaattgggcaagcataagacatgtcacaaagacccttttttgtatgtataagtgtaaaaattataacatccatagttggatttacataggtgtccaatcgggatctctccatcatcgagataattgatggcatctcccttccttttttagtagatatttcatcgtgtaagaatcaatattaatatttctaaagtatccgtgtatagcctctttatttaccacagctccatattccactagagggatatcgccgaatgtcatatactcaattagtatatgttggaggacatccgagttcattgttttcaatatcaaagagatggtttccttatcatttctccatagtggtacaatactacacattattccgtgcggctttccattttccaaaaacaatttgaccaaatctaaatctacatctttattgtatctataatcactatttagataatcagccataattcctcgagtgcaacatgttagatcgtctatatatgaataagcagtgttatctattcctttcattaacaatttaacgatgtctatatctatatgagatgacttaatataatattgaagagctgtacaatagtttttatctataaaagacggcttgattccgtgattaattagacatttaacaacttccggacgcacatatgctctcgtatccgactttgaatacagatgagagatgatatacagatgcaatacggtaccgcaatttcgtagttgataatcatcatacgcgtatcagtactcgtcctcataaagaacactgcagccattttctatgaacaaatcaataattttagaaacaggatcattgtcattacataattttctataactgaacgatggttttcacatttaacactcaagtcaaatccatgttctaccaacacctttatcaagtcaacgtctacatttttggatttcatatagctgaatatattaaagttatttatgttgctaaatccagtggcttctagtagagccatcgctatatccttattaactttaacatgtctactatttgtgtattcttctaatggggtaagctgtctccaatttttgcgtaatggattagtgccactgtctagtagtagtttgacgacctcgacattattacaatgctcattaaaaaggtatgcgtgtaaagcattattcttgaattggttcctggtatcattaggatctctgtctttcaacatctgtttaagttcatcaagagccacctcctcattttccaaatagtcaaacattttgactgaatgagctactgtgaactctatacacccacacaactaatgtcattaaatatcatgtcaaaaacttgtacaattattaataaaaataatttagtgtttaaattttaccagttccagattttacacctccgttaatacctccattaaccccactggacgatcctcctccccacattccaccgccaccagatgtataagttttagatcctttattactaccatcatgtccatggataaagacactccacatgccgccactaccccctttagaagacatattaataagacttaaggacaagtttaacaataaaattaatcacgagtaccctactaccaacctacactattatatgattatagtttctatttttacagtaccttgactaaagtttctagtcacaagagcaatactaccaacctacactattatatgattatagtttctatttttataggaacgcgtacgagaaaatcaaatgtctaatttctaacggtagtgttgataaacgattgttatccgcggatacctcctctatcatgtcgtctattttcttactttgttctattaacttattagcattatatattatttgattataaaacttatattgcttattagcccaatctgtaaatatcggattattaacatatcgtttctttgtaggtttatttaacatgtacatcactgtaagcatgtccttaccatttattttaatttgacgcatatccgcaatttctttttcgcagtcggttataaattctatatatgatggatacatgctacatgtgtacttataatcgactaatatgaagtacttgatacatattttcagtaacgatttattattaccacctatgaataagtacctgtgatcgtctaggtaatcaactgttttcttaatacattcgatggttggtaatttactcagaataatttccaatatcttaatatataattctgctatttctgggatatatttatctgccagtataacacaaatagtaatacatgtaaacccatattttgttattatattaatgtctgcgccattatctattaaccattctactaggctgacactatgcgactcaatacaatgataaagtatactacatccatgtttatctattttgtttatatcatcaatatacggcttacaaagttttagtatcgataacacatccaactcacgcatagagaaggtagggaataatggcataatatttattaggttatcatcattgtcattatctacaactaagtttccattttttaaaatatactcgacaactttaggatctctattgccaaatttttgaaaatatttatttatatgcttaaatctatataatgtagctccttcatcaatcatacatttaataacattgatgtatactgtatgataagatacatattctaacaatagatcttgtatagaatctgtatatcttttaagaattgtggatattaggatattattacataaactattacacaattctaaaatataaaacgtatcacggtcgaataatagttgatcaactatataattatcgattttgtgatttttcttcctaaactgtttacgtaaatagttagatagaatattcattagttcatgaccactatagttactatcgaataacgcgtcaaatatttcccgtttaatatcgcatttgtcaagataataatagagtgtggtatgttcacgataagtataataacgcatctctttttcgtgtgaaattaaatagtttattacgtccaaagatgtagcataaccatcttgtgacctagtaataatataataatagagaactgttttacccattctatcatcataatcagtggtgtagtcgtaatcgtaatcgtctaattcatcatcccaattataatattcaccagcacgtctaatctgttctattttgatcttgtatccatactgtatgttgctacatgtaggtattcctttatccaataatagtttaaacacatctacattgggatttgatgttgtagcgtatttttctacaatattaataccatttttgatactatttatttctatacctttcgaaattagtaatttcaataagtctatattgatgttatcagaacatagatattcgaatatatcaaaatcattgatatttttatagtcgactgacgacaataacaaaatcacaacatcgtttttgatattattatttttcttggtaacgtatgcctttaatggagtttcaccatcatactcatataatggatttgcaccactttctatcaatgattgtgcactgctggcatcgatgttaaatgttttacaactatcatagagtatcttatcgttaaccatgattggttgttgatgctatcgcattttttggtttctttcatttcagttatgtatggatttagcacgtttgggaagcatgagctcatatgatttcagtactgtagtgtcagtactattagtttcaataagatcaatctctagatctatagaatcaaaacacgataggtcagaagataatgaatatctgtacgcttcttgttgtactgtaacttctggttttgttagatggttgcatcgtgctttaacgtcaatggtacaaattttatcctcgctttgtgtatcatattcgtccctactataaaattctatattcagattatcatgcgatgtgtatacgctaacggtatcaataaacggagcacaccatttagtcataaccgtaatccaaaaatttttaaagtatatcttaacgaaagaagttgtatcattgtctacggtgtatggtactagatcctcataagtgtatatatctagagtaatgtttaatttattaaatggttgataatatggatcgtcgtggcaatttcctaagatggaaatgagatatagacacgcaataaatctaatcgaagacatggttactccttaaaaaaatacgaataatcaccttggctatttagtaagtgtcatttaacactatactcatattaatccatggactcataatctctatacgggattaacggatgttctatatacggggatgagtagttctcttctttaactttatactttttactaatcatatttagactgatgtatgggtaatagtgtttgaagagctcgttctcatcatcagaataaatcaatatctctgtttttttgttatacagatgtattacagcctcatatattacgtaatagaacgtgtcatctaccttattaactttcaccgcatagttgtttgcaaatacggttaatcctttgacctcgttgatttccgaccaatctgggcgtataatgaatctaaactttaatttcttgtaatcattcgaaataatttttagtttgcatccgtagttatcccctttatgtaactgtaaatttctcaacgcgatatctccattaataatgatgtcgaattcgtgctgtatacccatactgaatggatgaacgaataccgacggcgttaatagtaatttactttttcatctttacatattgggtactagttttactatcataagtttataaattccacaagctactatggaataagccaaccatcttagtataccacacatgtcttaaagtttattaattaattacatgttgttttatatatatcgctacgaatttaaacagagaaatcagtttaggaaaaaaaaaattatctatctacatcatcacgtctctgtattctacgatagagtgctactttaagatgagacatatccgtgtcatcaaaaatatactccattaaaatgattattccggcagcgaacttgatattggatatatcacaacctttgttaatatctacgacaatagacagcagtcccatggttccataaacagtgagtttatctttctttgaagagatattttgtagagatcttataaaactgtcgaatgacatcgcatttatatctttagctaaatcgtatatgttaccatcgtaatatctaaccgcgtctatcttaaacgtttccatcgctttaaagacgtttccgatagatggtctcatttcatcagtcatactgagccaacaaatataatcgtgtataacatctttgatagaatcagactctaaagaaaacgaatcggctttattatacgcattcatgataaacttaatgaaaaatgtttttcgttgtttaagttggatgaatagtatgtcttaataattgttattatttcattaattaatatttagtaacgagtacactctataaaaacgagaatgacataactaatcataactagttatcaaagtgtctaggacgcgtaattttcatatggtatagatcctgtaagcattgtctgtattctggagctattttctctatcgcattagtgagttcagaatatgttataaatttaaatcgaataacgaacataactttagtaaagtcgtctatattaactcttttattttctagccatcgtaataccatgtttaagatagtatattctctagttactacgatctcatcgttgtctagaatatcacatactgaatctacatccaattttagaaattggtctgtgttacatatctcttctatattattgttgatgtattgtcgtagaaaactattacgtagaccattttctttataaaacgaatatatagtactccaattatctttaccgatatatttgcacacataatccattctctcaatcactacatctttaagattttcgttgttaagatatttggctaaactatataattctattagatcatcaacagaatcagtatatatttttctagatccaaagacgaactctttggcgtcctctataatattcccagaaaagatattttcgtgttttagtttatcgagatctgatctgttcatatacgccatgattgtacggtacgttatgataaccgcataaaataaaaatccattttcatttttaaccaatactattcataattgagattgatgtaatactttgttactttgaacgtaaagacagtacacggatccgtatctccaacaagcacgtagtaatcaaatttggtgttgttaaacttcgcaatattcatcaatttagatagaaacttatactcatcatctgttttaggaatccatgtattattaccactttccaacttatcattatcccaggctatgtttcgtccatcatcgttgcgcagagtgaataattcttttgtattcggtagttcaaatatatgatccatgcatagatcggcaaagctattgtagatgtgatttttcctaaatctaatataaaactcgtttactagcaaacactttcctgatttatcgaccaagacacatatggtttctaaatctatcaagtggtggggatccatagttatgacgcagtaacatatattattacattcttgactgtcgctaatatctaaatatttattgttatcgtattggattctgcatatagatggcttgtatgtcaaagatatagaacacataaccaatttatagtcgcgctttacattctcgaatctaaagttaagagatttagaaaacattatatcctcggatgatgttatcactgtttctggagtaggatatattaaagtctttacagatttcgtccgattcaaataaatcactaaataatatcccacattatcatctgttagagtagtatcattaaatctattatattttatgaaagatatatcactgctcacctctatatttcgtacatttttaaactgtttgtataatatctctctgatacaatcagatatatctattgtgtcggtagacgataccgttacatttgaattaatggtgttccattttacaacttttaacaagttgaccaattcatttctaatagtatcaaactctccatgattaaatattttaatagtatccattttatatcactacggacacaaagtagctgacataaaccattgtataatttttatgttttatgtttattagcgtacacattttggaagttccggcttccatgtatttcctggagagcaagtagatgatgaggaaccagatagtttatatccgtacttgcacttaaagtctacattgtcgttgtatgagtatgatcttttaaacccgctagacaagtatccgtttgatattgtaggatgtggacatttaacaatctgacacgtgggtggatcggaccattctcctcctgaacacaggacactagagttaccaatcaacgaatatccactattgcaactataagttacaacgctcccatcggtataaaaatcctcgtatccgttatgtcttccgttggatatagatggaggggattggcatttaacagattcacaaataggtgcctcgggattccataccatagatccagtagatcctaattcacaatacgatttagattcaccgatcaactgatatccgctattacaagagtacgttatactagagccaaagtctactccaccaatatcaagttggccattatcgatatctcgaggcgatgggcatctccgtttaatacattgattaaagagtgtccatccagtacctgtacatttagcatatataggtcccattttttgctttctgtatccaggtagacatagatattctatagtgtctcctatgttgtaattagcattagcatcagtctccacactattcttaaatttcatattaatgggtcgtgacggaatagtacagcatgatagaacgcatcctattcccaacaatgtcaggaacgtcacgctctccaccttcatatttatttatccgtaaaaatgttatcctggacatcgtacaaataataaaaagcccatatatgttcgctattgtagaaattgtttttcacagttgctcaaaaacgatggcagtgacttatgagttacgttacactttggagtctcatctttagtaaacatatcataatattcgatattacgagttgacatatcgaacaaattccaagtatttgattttggataatattcgtattttgcatctgctataattaagatataatcaccgcaagaacacacgaacatctttcctacatggttaaagtacatgtacaattctatccatttgtcttccttaactatatatttgtatagataattacgagtctcgtgagtaattccagtaattacatagatgtcgccgtcgtactctacagcataaactatactatgatgtctaggcatgggagacttttttatccaacgatttttagtgaaacattccacatcgtttaatactacatatttctcatacgtggtataaactccacccattacatatatatcatcgtttacgaataccgacgcgcctgaatatctaggagtaattaagtttggaagtcttatccatttcgaagtgccgtgtttcaaatattctgccacacccgttgaaatagaaaattctaatcctcctattacatataactttccatcgttaacacaagtactaacttctgattttaacgacgacatattagtaaccgttttccattttttcgttttaagatctacccgcgatacggaataaacatgtctattgttaatcatgccgccaataatgtatagacaattatgtaaaacatttgcattatagaattgtctatctgtattaccgactatcgtccaatattctgttctaggagagtaatgggttattgtggatatataatcagagtttttaatgactactatattatgttttataccatttcgtgtcactggctttgtagatttggatatagttaatcccaacaatgatatagcattgcgcatagtattagtcataaacttgggatgtaaaatgttgatgatatctacatcgtttggatttttatgtatccactttaataatatcatagctgtaacatcctcatgatttacgttaacgtcttcgtgggataagatagttgtcagttcatcctttgataattttccaaattctggatcggatgtcaccgcagtaatattgttgattatttctgacatcgacgcattatatagttttttaattccatatcttttagaaaagttaaacatccttatacaatttgtgaaattaatattatgaatcatagtttttacacatagatctactacaggcggaacatcaattattatggcagcaactagtatcatttctacattgtttatggtgatgtttatcttcttccagcgcatatagtctaatagcgattcaaacgcgtgatagtttataccattcaatataatcgcttcatcctttagatggtgatcctgaatgcgtttaaaaaaattatacggagacgccgtaataatttccttattcacttgtataatttccccattgatagaaaatattacgctttccattcttaaagtactataagtaattatagtataatgtaaacgtttatatattcaatatttttataaaaatcattttgacattaattcctttttaaatttccgtctatcatctatagaaacgtattctatgaatttataaaatgcttttacgtgtcctatcgtaggcgatagaaccgctaaaaagcctatcgaatttctacaaaagaatctgttatatggtatagggagagtataaaacattaaatgtccgtacttattaaagtattcagtagccaatcctaactctttcgaatacttattaatggctcttgttctgtacgaatctatttttttgaacaacggacctagtggtatatcttgttctatgtatctaaaataatgtctgactagatccgttagtttaatatccgcagtcatcttgtctagaatggcaaatctaactgcgggtttaggctttagtttagtttctatatctacatctatgtctttatctaacaccaaaaatataatagctaatattttattacaatcatccggatattcttctacgatctcactaactaatgtttctttggttatactagtatagtcactatcggacaaataaagaaaatcagatgatcgatgaataatacatttaaattcatcatctgtaagatttttgagatgtctcattagaatattattagggttagtactcattatcattcggcagctattacttattttattatttttcaccatatagatcaatcattagatcatcaaaatatgtttcaatcatcctaaagagtatggtgaatgactcttcccatctaatttctgaacgttcaccaatgtctctagccactttggcactaatagcgatcattcgcttagcgtcttctatattattaactggttgatttaatctatctagcaatggaccgtcggacagcgtcattctcatgttcttaatcaatgtacatacatcgccgtcatctaccaattcatccaacaacataagctttttaaaatcatcattataataggtttgatcgttgtcatttctccaaagaatatatctaataagtagagtcctcatgcttagttaacaactattttttatgttaaatcaattagtacaccgctatgtttaatacttattcatattttagtttttaggattgagaatcaatacaaaaaattaatgcatcattaattttagaaatacttagtttccacgtagtcaatgaaacatttgaactcatcgtacaggacgttctcgtacaggacgtaactataaaccggtttatatttgttcaagatagatacaaatccgataactttttttacgaattctacgggatccactttaaaagtgtcataccgggttctttttatttttttaaacagatcaatggtgtgatgttgattaggtcttttacgaatttgatatagaatagcgtttacatatcctccataatggtcaatcgccatttgttcgtatgtcataaattctttaattatatgacactgtgtattatttagttcatccttgttcattgttaggaatctatccaaaatggcaattatactagaactataggtgcgttgtatacacatattgatgtgtctgtttatacaatcaatgctactaccttcgggtaaaattgtagcatcatataccatttctagtactttaggttcattattatccattgcagaggacgtcatgatcgaatcataaaaaaatatattatttttatgttattttgttaaaaataatcatcgaatacttcgtaagatactccttcatgaacataatcagttacaaaacgtttatatgaagtaaagtatctacgatttttacaaaagtccggatgcataagtacaaagtacgcgataaacggaataataatagatttatctagtctatctttttctatagctttcatagttagatacatggtctcagaagtaggattatgtaacatcagcttcgataaaatgactgggttatttagtcttacacattcgctcatacatgtatgaccgttaactacagagtctacactaaaatgattgaacaatagatagtctaccattgtttcgtattcagatagtacagcgtagtacatggcatcttcacaaattatatcattgtctaatagatatttgacgcatcttatggatcccacttcaacagccatcttaaaatcggtagaatcatattgctttcctttatcattaataatttctagaacatcatctctatcataaaagatacaaatattaactgtttgatccgtaataacattgctagtcgatagcaatttgttaataagatgcgctgggctcaatgtcttaataagaagtgtaagaggactatctccgaatttgttttgtttattaacatccgttgatggaagtaaaagatctataatgtctacattcttgactgttttagagcatacaatatggagaggtgtatttccatcatgatctggttttgagggactaattcctagtttcatcatccatgagattgtagaagcttttggattgtctgacataagatgtctatgaatatgatttttgccaaatttatccactatcctggcttcgaatccgatggacattatttttttaaacactctttctgaaggatctgtacacgccaacaacggaccacatccttcttcatcaaccgagttgttaatcttggctccatactgtaccaataaatttattctctctatgacttcatcatctgttcccgagagataatatagaggcgttttatgctgtttatcacacgcgtttggatctgcgccgtgcgtcagcagcatcgcgactattctattattattaattttagaagctatatgcaatggataatttccatcatcatccgtctcatttggagagtatcctctatgaagaagttcttcgacaaatcgttcatctagtcctttaattccacaatacgcatgtagaatgtgataattatttccagaaggttcgatagcttgtagcatattcctaaatacatctaaatttttactattatatttggcataaagagatagataatactcggccgacataatgttgtccattgtagtataaaaattaatatttctatttctgtatatttgcaacaatttactctctataacaaatatcataacttagttcttttatgtcaagaaggcactggtttagttcatctataaatgtcacgccataactaccacgcatgccatactcagaattatgataaagatatttatccttggggtgtaggtaatggggattaatctttgttggatcagtctctaagttaacacatgtcacacatgatccatttatagttatatcacacgatgatgatttatgaattgattccggaagatcgctatcgtattttgtggttccacaattcatttccatacatgttattgtcacactaatattatgatgaactttatctagccgctgagtggtaaacaacagaacagatagtttattatctttaccaacaccctcagccgctgccacaaatctctgatccgtatccatgatggtcatgtttatttctagtccgtatccagtcaacactatgttagcatttctgtcgatatagctttcactcatatgacactcaccaataatagtagaattaatgtcgtaatttacaccaatagtgagttcggcggcaaagtaccaataccggtaatcttgtcgaggaggacatatagtattcttgtattctaccgaatacccgagagatgcgatacaaaagagcaagactaatttgtaaaccatcttactcaaaatatgtaacaatagtacgatgcaatgagtaagacaataggaaatctatcttatatacacataattattctatcaattttaccaattagttagtgtaatgttaacaaaaatgtgggagaatctaattagtttttctttacacaattgacgtacatgagtctgagttccttgtttttgctaattatttcatccaatttattattcttgacgatatcgagatcttttgtataggagtcaaacttgtattcaacatgcttttctataatcattttagctatttcggcatcatccaatagtacattttccagattagcagaatagatattaatgtcgtatttgaacagagcctgtaacatctcaatgtctttattatctatagccaatttaatgtccggaatgaagagaagggaattattggtgtttgtcgacgtcatatagtcgagcaagagaatcatcatatccacgtgtccattttttatagtgatgtgaatacaactaaggagaatagccagatcaaaagtagatggtatctctgaaagaaagtaggaaacaatacttacatcattaagcatgacggcatgataaaatgaagttttccatccagttttcccatagaacatcagtctccaatttttcttaacaaacagttttaccgtttgcatgttaccactatcaaccgcataatacaatgcggtgtttcccttgtcatcaaattgtgaatcatccagtccactgaatagcaaaatctttactattttggtatcttccaatgtggctgcctgatgtaatggaaattcattctctagaagatttttcaatgctccagcgttcaacaacgtacatactagacgcacgttattatcagctattgcataatacaaggcactatgtccatggacatccgccttaaatgtatctttactagagagaaagcttttcagctgcttagacttccaagtattaattcgtgacagatccatgtctgaaacgagacgctaattagtgtatattttttcattttttataattttgtcatattgcaccagaattaataatatctttaatagatctgattagtagatacatggctatcgcaaaacaacatatacacatttaataaaaataatatttattaagaaaattcagatttcacgtacccatcaatataaataaaataatgattccttacaccgtacccatattaaggagattccaccttacccataaacaatataaatccagtaatatcatgtctgatgatgaacacaaatggtgtattaaattccagtttttcaggagatgatctcgccgtagctaccataatagtagatgcctctgctacagttccttgttcgtcgacatctatctttgcattctgaaacattttataaatatataatgggtccctagtcatatgtttaaacgacgcattatctggattaaacatactaggagccatcatttcggctatcgacttaatatccctcttattttcgatagaaaatttagggagtttaagattgtacactttattccctaattgagacgaccaatagtctaattttgcagccgtgatagaatctgtgaaatgggtcatattatcacctattgccaggtacatactaatattagcatccttatacggaaggcgtaccatgtcatattctttgtcatcgattgtgattgtatttccttgcaatttagtaactacgttcatcatgggaaccgttttcgtaccgtacttattagtaaaactagcattgcgtgttttagtgatatcaaacggatattgccatatacctttaaaatatatagtattaatgattgcccatagagtattattgtcgagcatattagaatctactacattagacataccggatctacgttctactatagaattaattttattaaccgcatctcgtctaaagtttaatctatataggccgaatctatgatattgttgataatacgacggtttaatgcacacagtattatctacgaaactttgataagttagatcagtgtacgtatatttagatgttttcagcttagctaatcctgatattaattctgtaaatgctggacccagatctctttttctcaaatccatagtcttcaataattctattctagtattacctgatgcaggcaatagcgacataaacatagaaaacgaataaccaaacggtgagaagacaatattatcatcttgaatatttttatacgctactataccggcattggtaaatccttgtagacgataggcggacgctgaacacgctaacgatagtatcaataacgcaatcatgattttatggtattaataattaaccttatttttatgttcggtataaaaaaattattgatgtctacacatccttttgtaattgacatctatatatccttttgtataatcaactctaatcactttaacttttacagttttccctaccagtttatccctatattcaacatatctatccatatgcatcttaacactctctgccaagatagcttcagagtgaggatagtcaaaaagataaatatatagagcataatcattctcgtatactctgccctttattacatcacccgcattgggcaacgaataacaaaatgcaagcatcttgttaacgggctcgtaaattgggataaaaattatgtttttattgtcttatatctattttattcaagagaatattcaggaatttctttttccggttgtatctcgtcgcagtatatatcatttgtacattgtttcatattttttaatagtttacaccttttagtaggactagtatcgtacaattcatagctgtattttgaattccaatcacgcataaaaatatcttccaattgttgacgaagacctaatccatcatccggtgtaatattaatagatgctccacatgtatccgtaaagtaatttcctgtccaatttgaggtacctatataggccgttttatcggttaccatatatttggcatggtttaccctagaatacggaatgggaggatcagcatctggtacaataaatagctttacttctatatttatgtttttagattttagcatagcgatagatcttaaaaagtttctcatgataaacgaagatcgttgccagcaactaatcaatagcttaacggatacttgtctgtctatagcggatcttcttaattcatcttctatataaggccaaaacaaaattttacccgccttcgaataaataatagggataaagttcataacagatacataaacgaatttactcgcatttctaatacatgacaataaagcggttaaatcattggttctttccatagtacatagttgttgcggtgcagaagcaataaatacagagtgtggaacgccgcttacgttaatactaagaggatgatctgtattataatacgacggataaaagtttttccaattatatggtagattgttaactccaagataccagtatacctcaaaaatttgagtgagatccgctgccaagttcctattattgaagatcgcaatacccaattccttgacctgagttagtgatctccaatccatgttagcgcttcctaaataaatatgtgtattatcagatatccaaaattttgtatgaagaactcctcctaggatatttgtaatatctatgtatcgtacttcaactccggccatttgtagtctttcaacatcctttaatggtttgttagatttattaacggctactctaactcgtactcctcttttgggtaattgtacaatctcgtttaatattatcgtgccgaaattcgtacccacttcatccgataaactccaataaaaagatgatatatctagtgtttttgtggtattggatagaatttccctccacatgttaaatgtagacaaatatactttatcaaattgcatacctataggaatagtttctgtaatcactgcgattgtattatccggattcattttatttgttaaaagaataatcctatatcacttcactctattaaaaatccaagtttctatttctttcatgactgattttttaacttcatccgtttccttatgaagatgatgtttggcaccttcataaatttttatttctctattacaatttgcatgttgcatgaaataatatgcacctaaaacatcgctaatcttattgtttgttccctggagtatgagagtcgggggggtgttaatcttggaaattatttttctaaccttgttggtagccttcaagacctgactagcaaatccagccttaattttttcatgattgactaatgggtcgtattggtatttataaactttatccatatctctagatactgattctggacatagctttccgactggcgcatttggtgtgatggttcccataagtttggcagctagcagattcagtcttgaaacagcatctgcattaactagaggagacattagaatcattgctgtaaacaagtttggattatcgtaagaggctagctcccatggaatgacccaataagtagatttaatagttaccacgtgctgtaccaaagtcatcaatcatcattttttcaccattacttcttccatgtccaatatgatcatgtgagaatactaaaattcctaacgatgatatgttttcagctagttcgtcataacgtccagaatgtttaccagctccatgacttatgaatactaatgccttaggatatgtaataggtttccaatatttacaatatatgtaatcattgtccagattgaacatacagtttgcactcatgattcacgttatataactatcaatattaacagttcgtttgatgatcatattatttttatgttttattgataattgtaaaaacatacaattaaatcaatatagaggaaggagacggctactgtcttttgtaagatagtcatggcgactaaattagattatgaggatgctgttttttactttgtggatgatgataaaatatgtagtcgcgactccatcatcgatctaatagatgaatatattacgtggagaaatcatgttatagtgtttaacaaagatattaccagttgtggaagactgtacaaggaattgatgaagttcgatgatgtcgctatacggtactatggtattgataaaattaatgagattgtcgaagctatgagcgaaggagaccactacatcaattttacaaaagtccatgatcaggaaagtttattcgctaccataggaatatgtgctaaaatcactgaacattggggatacaaaaagatttcagaatctagattccaatcattgggaaacattacagatttgatgaccgacgataatataaacatcttgatactttttctagaaaaaaaattgaattgatgatataggggtcttcataacgcataattattacgttagcattctatatccgtgttaaaaaaaattatcctatcatgtatttgagagttttatatgtagcaaacatgatagctgtgatgccaataagctttagatattcacgcgtgctagtgttagggatggtattatctggtggtgaaatgtccgttatataatctacaaaacaatcatcgcatatagtatgcgatagtagagtaaacatttttatagtttttactggattcatacatcgtctacccaattcggttataaatgaaattgtcgccaatcttacacccaaccccttgttatccattagcatagtattaacttcgttatttatgtcataaactgtaaatgattttgtagatgccatatcatacatgatattcatgtccctattataatcattactaactttatcacaatatatgttgataatatctatatatgatctagtctttgtgggcaactgtctatacaagtcgtctaaacgttgtttactcatatagtatcgaacagccatcattacatggtcccgttccgttgatagataatcgagtatgttagtggacttgtcaaatctatataccatattttctggaagtggatatacatagtcgtgatcaacattattgctagcctcatcttctatatcctgtactataccattatctatatcatctacataatctatgatattattacacataaacatcgacaacatactattgtttattatctaagtcctgttgatccaaacccttgatctcctctatttgtactatctagagattgtacttcttccagttctggataatatatacgttgatagattagctgagctattctatctccagtatttacattaaacgtacattttccattattaataagaatgactcctatgtttcccctataatcttcgtctattacaccacctcctatatcaatgccttttagtgacagaccagacctaggagctattctaccatagcagaacttaggcatggacatactaatatctgtcttaattaactgtctttctcctggagggatagtataatcgtaagcgctatacaaatcatatccggcagcacccggcgattgcctagtaggagatttagctctgttagtttccttaacaaatctaactggtgagttaatattcatgttgaacataaaactaatattttatttcaaaattatttaccatcccatatattccatgaataagtgtgatgattgtacacttctatagtatctatatacgatccacgataaaatcctcctatcaatagcagtttattatccactatgatcaattctggattatccctcggataaataggatcatctatcagagtccatgtattgctggattcacaataaaattccgcatttctaccaaccaagaataaccttctaccgaacactaacgcgcatgatttataatgaggataataagtggatggtccaaactgccactgatcatgattgggtagcaaatattctgtagttgtatcagtttcagaatgtcctcccattacgtatataacattgtttatggatgccactgctggattacatctaggtttcagaagactcggcatattaacccaagcagcatccccgtggaaccaacgctcaacagatgtgggatttggtagacctcctactacgtataatttattgttagcgggtatcccgctagcatacagtctggggctattcatcggaggaattggaatccaattgtttgatatataatttaccgctatagcattgttatgtatttcattgttcatccatccaccgatgagatatactacttctccaacatgagtacttgtacacatatggaatatatctataatttgatccatgttcataggatactctatgaatggatacttgtatgatttgcgtggttgtttatcacaatgaaatattttggtacagtctagtatccattttacattatttatacctctgggagaaagataatttgacctgattacatttttgataaggagtagcagatttcctaatttatttcttcgctttatataccacttaatgacaaaatcaactacataatcctcatctggaacatttagttcatcgctttctagaataagtttcatagatagataatcaaaattgtctatgatgtcatcttccagttccaaaaagtgtttggcaataaagtttttagtatgacataagagattggatagtccgtattctatacccatcatgtaacactcgacacaatattcctttctaaaatctcgtaagataaagtttatacaagtgtagatgataaattctacagaggttaatatagaagcacgtaataaattgacgacgttatgactatctatatatacctttccagtatacgagtaaataactatagaagttaaactgtgaatgtcaaggtctagacaaaccctcgtaactggatctttatttttcgtgtatttttgacgtaaatgtgtgcgaaagtaaggagataactttttcaatatcgtagaattgactattatattgcctcctatggcatcaataattgttttgaatttcttagtcatagacaatgctaatatattcttacagtacacagtattgacaaatatcggcatttatgtttctttaaaagtcaacatctagagaaaaatgattatctttttgagacataactcccattttttggtattcacccacacgtttttcgaaaaaattagtttttccttccaatgatatattttccatgaaatcaaacggattggtaacattataaatttttttaaatcccaattcagaaatcaatctatccgcgacgaattctatatatgttttcatcatttcacaattcattcctataagtttaactggaagagccgcagtaagaaattcttgttcaatggatactgcatctgttataatagatctaacggtttcttcactcggtggatgcaataaatgtttaaacatcaaacatgcgaaatcgcagtgcagaccctcgtctctactaattagttcgttggaaaacgtgagtccgggcattaggccacgctttttaagccaaaatatggaagcgaatgatccggaaaagaagattccttctactgcagcaaaggcaataagtctctctccataaccggcgctgtcatgtatccacttttgagcccaatcggccttcttttttacacaaggcatcgtttctatggcattaaagagatagtttttttcattactatctttaacataagtatcgatcaaaagactatacatttccgaatgaatgttttcaatggccatctgaaatccgtagaaacatctagcctcggtaatctgtacttctgtacaaaatcgttccgccaaattttcattcactattccgtcactggctgcaaaaaacgccaatacatgttttataaaatatttttcgtctggtgttagtttattccaatcattgatatctttagatatatctacttcttccactgtccaaaatgatgcctctgcctttttatacatgttccagatgtcatgatattggattgggaaaataacaaatctatttggatttggtgcaaggatgggttccataactaaattaacaataacaataaattttttttcagttatctatatgcctgtacttggattttttgtacatcgatatcgccgcaatcactacaataattacaagtattattgatagcattgttattagtactatcataattaaattatctacattcatgggtgctgaataatcgttattatcatcattatcattttgtaattgtgacatcatactagataaatcgtttgcgagattgttgtgggaagcgggcatggaggatgcattatcattattatttaacgccttccatttggattcacaaatgttacgcacattcaacattttatggaaactataattttgtgaaaacaaataacaagaaaactcgtcatcgttcaaatttttaacgatagtaaaccgattaaacgtcgagctaatttctaacgctagcgactctgttggatatgggtttccagatatatatcttttcagttcccctacgtatctataatcatctgtaggaaatggaagatatttccatttatctactgttcctaatatcatatgtggtggtgtagtagaaccattaagcgcgaaagatgttatttcgcatcgtattttaacttcgcaataatttctggttagataacgcactctaccagtcaagtcaatgatattagcctttacagatatattcatagtagtcgtaacgatgactccatcttttagatgcgatactcctttgtatgtaccagaatcttcgtacctcaaactcgatatatttaaacaagttaatgagatattaacgcgttttatgaatgatgatatataaccagaagttttatcctcggtggctagcgctataaccttatcattataataccaactagtgtgattaatatgtgacacgtcagtgtgggtacaaatatgtacattatcgtctacgtcgtattcgatacatccgcatacagccaacaaatataaaatgacaaatactctaacgccgttcgtacccatcttgatgcggtttaataaatgttttgatttcaatttattgtaaaaaaagattcggttttatactgttcgatattctcattgcttatattttcatctatcatctccacacagtcaaatccgtggttagcatgcacctcatcaaccggtaaaagactatcggactcttctatcattataactctagaatatttaatttggtcattattaatcaagtcaattatcttatttttaacaaacgtgagtattttactcattttttataaaaacttttagaaatatacagactctatcgtgtgtctatatcttctttttatatccaatgtatttatgtctgatttttcttcatttatcatatataatggtccaaattctacacgtgcttcggattcatccagatcattaaggttcttataattgtaacatccttctcttccctcttctacatcttccttcttattcttattcttagcgtcacagaatctaccacagcaggatcccatgacgagcgtcatattaaactaatccattttcaattataatatatgattagtaatgaccattaaaataaaaaatattcttcataaccggcaagaaagtgaaaagttcacattgaaactatgtcagtagtatacatcatgaaatgatgatatatatatactctattttggtggaggattatatgatataattcgtggataatcatttttaagacacatttctttattcgtaaatcttttcacgttaaatgagtgtccatattttgcaatttcttcatatgatggcggtgtacgtggacgaggctgctcctgttcttgttgtggtcgccgactgtcgtgtctgcgtttagatccctccattatcgcgattgcgtagatggagtactattttataccttgtaattaaatttttttattaattaaacgtataaaaacgttccgtatctgtatttaagagccagatttcgtctaatagaacaaatagctacagtaaaaataactagaataattgctacacccactagaaaccacggatcgtaatacggcaatcggttttcgataataggtggaacgtatattttatttaaggacttaacaattgtctgtaaaccacaatttgcttccgcggatcctgtattaactatctgtaaaagcatatgttgaccgggcggagccgaacattctccgatatctaatttctgtatatctataatattattaacctccgcatacgcattacagttcttttctagcttggataccgcactaggtacatcgtctagatctattcctatttcctcagcgatagctcttctatccttttccggaagcaatgaaatcacttcaataaatgattcaaccatgagtgtgaaactaagtcgagaattactcatgcatttgttagttattcggagcgcgcaatttttaaactgtcctataacctctcctatatgaatagcacaagtgacattagtagggatagaatgttgagctaatttttgtaaataactatctataaaaagattatacaaagttttaaactctttagtttccgccatttatccagtctgagaaaatgtctctcataataaatttttccaagaaactaattgggtgaagaatggaaacctttaatctatatttatcacagtctgttttggtacacatgatgaattcttccaatgccgtactaaattcgatatctttttcgatttctggatatgtttttaataaagtatgaacaaagaaatggaaatcgtaataccagttatgtttaactttgaaattgttttttattttcttgttaatgattccagccacttgggaaaagtcaaagtcgtttaatgccgatttaatacgttcattaaaaacaaactttttatcctttagatgaattattattggttcattggaatcaaaaagtaagatattatcgggtttaagatctgcgtgtaaaaagttgtcgcaacagggtagttcgtagattttaatgtataacagagccatctgtaaaaagataaactttatgtattgtaccaaagatttaaatcctaatttgatagctaactcggtatctactttatctgccgaatacagtgctaggggaaaaattataatgtttcctctttcatattcgtagttagttctcttttcatgttcgaaaaagtgaaacatgcggttaaaatagtttataacattaatattactgttaataactgccggataaaagtgggatagtaatttcacgaatttgatactgtcctttctctcgttaaacgcctttaaaaaaactttagaagaatatctcaatgagagttcctgaccatccatagtttgtatcaataatagcaacatatgaagaacacgtttatacagagtatgtaaaaatgttaatttatagtttaatcccatggcccacgcacacacgattaattttttttcatctccctttagattgttgtatagaaatttgggtactgtgaactccgccgtagtttccatgggactatataattttgtggcctcgaatacaaattttactacatagttatctatcttaaagactataccatatcctcctgtagatatgtgataaaaatcgtcgtttataggataaaatcgtttatccttttgttggaaaaaggatgaattaatgtaatcattctcttctatctttagtagtgtttccttattaaaattcttaaaataatttaacaatctaactgacggagcccaattttggtgtaaatctaattgggacattatattgttaaaatacaaacagtctcctaatataacagtatctgataatctatggggagacatccattgatattcaggggatgaatcattggcaacacccatttattgtacaaaaagccccaatttacaaacgaaagtccaggtttgatagagacaaacaattaactattttgtctctgtttttaacacctccacagtttttaatttctttagtaatgaaattattcacaatatcagtatcttctttatctaccagagattttactaacttgataaccttggctgtctcattcaatagggtagtaatatttgtatgtgtgatattgatatctttttgaattgtttcttttagaagtgattctttgatggtgccagcatacgaattacaataatgcagaaactcggttaacatgcaggaattatagtaagccaattccaattgttgcctgtgttgtattagagtgtcaatatgagcaatggtgtccttgcgtttctctgatagaatgcgagcagcgattttggcgttatcatttgacgatatttctggaatgacgaatcctgtttctactaactttttggtaggacaaagtgaaacaatcaagaagatagcttctcctcctatttgtggaagaaattgaactcctctagatgatctactgacgatagtatctccttgacagatattggaccgaattacagaagtacctggaatgtaaagccctgaaaccccctcattttttaagcagattgttgccgtaaatcctgcactatgcccaagatagagagctcctttggtgaatccatctctatgtttcagtttaaccaagaaacagtcagctggtctaaaatttccatctctatctaatacagcatctaacttgatgtcaggaactatgaccggtttaatgttatatgtaacattgagtaaatccttaagttcataatcatcactgtcatcagttatgtacgatccaaacaatgtttctaccggcatagtggatacgaagatgctatccatcagaatgtttccctgattagtattttctatatagctattcttctttaaacgattttccaaatcagtaactatgttcatttttttaggagtaggacgcctagccagtatggaagaggattttctagatcctctcttcaacatctttgatctcgatggaatgcaaaaccccatagtgaaacaaccaacgataaaaataatattgtttttcactttttataattttaccatctgactcatggattcattaatatctttataagagctactaacgtataattctttataactgaactgagatatatacaccggatctatggtttccataattgagtaaatgaatgctcggcaataactaatggcaaatgtatagaacaacgaaattatactagagttgttaaagttaatattttctatgagctgttccaataaattatttgttgtgactgcgttcaagtcataaatcatcttgatactatccagtaaaccgtttttaagttctggaatattatcatcccattgtaaagcccctaattcgactatcgaatatcctgctctgatagcagtttcaatatcgacggacgtcaatactgtaataaaggtggtagtattgtcatcatcgtgataaactacgggaatatggtcgttagtaggtacggtaactttacacaacgcgatatataactttccttttgtaccatttttaacgtagttgggacgtcctgcagggtattgttttgaagaaatgatatcgagaacagatttgatacgatatttgttggattcctgattattcactataatataatctagacagatagatgattcgataaatagagaaggtatatcgttggtaggataatacatccccattccagtattctcggatactctattgatgacactagttaagaacatgtcttctattctagaaaacgaaaacatcctacatggactcattaaaacttctaacgctcctgattgtgtctcgaatgcctcgtacaaggatttcaaggatgccatagattctttgaccaacgatttagaattgcgtttagcatctgatttttttattaaatcgaatggtcggctctctggtttgctaccccaatgataacaatagtcttgtaaagataaaccgcaagaaaatttatacgcatccatccaaataaccctagcaccatcggatgatattaatgtattattatagattttccatccacagttattgggccagtatactgttagcaacggtatatcgaatagattactcatgtaacctactagaatgatagttcgtgtactagtcataatatctttaatccaatctaagaaatttaaaattagattttttacactgttaaagttaacaaaggtattacccggatacgtggatatcatatatggcattggtccattatcagtaatagctccataaactgatacggcgatggtttttatatgtgtttgatctaacgaggaagaaattcgcgcccacaattcatctctagatatgtatttaatatcaaacggtaacacatcaatttcgggacgcgtatatgtttctaaatttttaatccaaatataatgatgacctatatgccctattatcatactgtcaactatagtacacctagagaacttacgatacatctgtttcctgtaatcgttaaattttacaaatctataacatgctaaaccttttgacgacagccattcattaatttctgatatggaatctgtattctcgataccgtatcgttctaaagccagtgctatatctccctgttcgtgggaacgctttcgtataatatcgatcaacggataatctgaagtttttggagaataatatgactcatgatctatttcgtccataaacaatctagacataggaattggaggcgatgatcttaattttgtgcaatgagtcgtcaatcctataacttctaatcttgtaatattcatcatcgacataatactatctatgttatcatcgtatattagtataccatgaccttcttcatttcgtgccaaaatgatatacagtcttaaatagttacgcaatatctcaatagtttcataattgttagctgttttcatcaaggtttgtatcctgtttaacatgatggcgttctataacgtctctattttctatttttaattttttaaatttttaacgatttactgtggctagatacccaatctctctcaaatatttttttagcctcgcttacaagctgtttatctatactattaaaactgacgaatccgtgattttggtaatgggttccgtcgaaatttgccgaagtgatatgaacatattcgtcgtcgactatcaacaattttgtattattctgaatagtgaaaaccttcacagatagatcattttgaacacacaacgcatctagacttttggcggttgccatagaatatacgtcgttcttatcccaattaccaactagaagtctgatcttaactcctctattaatggctgcttctataatggagttgtaaatgtcgggccaatagtagctattaccgtcgacacgtgtagtgggaactatggccaaatgttcaatatctatactagtcttagctgacctgagtttatcaataactacatcggtatctagatctctagaatatcccaataggtgttccggagaatcagtaaagaacactccacctataggattcttaatatgatacgcagtgctaactggcaaacaacaagccgcagagcataaattcaaccatgaattttttgcgctattaaaggctttaaaagtatcaaatcttctacgaagatctgtggccagcgggggataatcagaatatacacctaacgttttaatcgtatgtatagatcctccagtaaatgacgcgtttcctacataacatctttcatcatctgacacccaaaaacaaccgagtagtagtcccacattattttttttatctatattaacggttataaaatttatatccgggcagtgactttgtagctctcccagatttcttttccctcgttcatctagcaaaactattattttaatccctttttcagatgcctcttttagtttatcaaaaataagcgctcccctagtcgtactcagaggattacaacaaaaagatgctatgtatatatatttcttagctagagtgataatttcgttaaaacattcaaatgttgttaaatgatcggatctaaaatccatattttctggtagtgtttctaccagcctacattttgctcccgcaggtaccgatgcaaatggccacatttagttaacataaaaacttatacatcctgttctatcaacgattctagaatatcatcggctatatcgctaaaattttcatcaaagtcgacatcacaacctaactcagtcaatatattaagaagttccatgatgtcatcttcgtctatttctatatccgtatccattgtagattgttgaccgattatcgagtttaaatcattactaatactcaatccttcagaatacaatctgtgtttcattgtaaatttataggcggtgtatttaagttggtagattttcaattatgtattaatatagcaacagtagttcttgctcctccttgattctagcatcctcttcattattttcttctacgtacataaacatgtccaatacgttagacaacacaccgacgatggcggccgctacagacacgaatatgactaaaccgatgaccatttaaaaacccctctctagctttcacttaaactgtatcgatcattcttttagcacatgtataatataaaaacattattctatttcgaatttaggcttccaaaaatttttcatccgtaaaccgataataatatatatagacttgttaatagtcggaataaatagattaatgcttaaactatcatcatctccacgattagagatacaatatttacattctttttgctgtttcgaaactttatcaatacacgttaatacaaacccaggaaggagatattgaaactgaggctgttgaaaatgaaacggtgaatacaataattcagataatgtaaaatcatgattccgtattctgatgatattagaactgctaatggatgtcgatggtatgtatctaggagtatctattttaacaaagcatcgatttgctaatatacaattatccttttgattaattgttattttattcatattcttaaaaggtttcatatttatcaattcttctacattaaaaatttccatttttaatttatgtagccccgcaatactcctcattacgtttcattttttgtctataatatccattttgttcatctcggtacatagattatccaattgagaagcgcatttagtagttttgtacattttaagtttattgacgaatcgtcgaaaactagttatagttaacattttattatttgataccctgatattaatacccctgccgttactattatttataactgatgtaatccacgtaacattggaattaactatcgatagtaatgcatcgacgcttccaaaattgtctattataaactcaccgataatttttttattgcatgttttcatattcattaggattatcaaatctttaatcttattacgattgtatgcgttgatattacaagacgtcattctaaaagacggaggatctccatcaaatgccagacaatcacgtacaaagtacatggaaataggttttgttctattgcgcatcatagatttatatagaacacccgtagaaatactaatttgttttactctataaaatactaatgcatctatttcatcgttttgtataacgtctttccaagtgtcaaattccaaatttttttcattgatagtaccaaattcttctatctctttaactacttgcatagataggtaattacagtgatgcctacatgccgttttttgaaactgaatagatgcgtctagaagcgatgctacgctagtcacaatcaccactttcatatttagaatatatatatgtaaaaatatagtagaatttcattttgtttttttctatgctataaatgaattctcattttgcatctgctcatactccgttttatattaataccaaagaaggaagatatctggttctaaaagccgttaaagtatgcgatgttagaactgtagaatgcgaaggaagtaaagcttcctgcgtactcaaagtagataaaccctcatcgcccgcgtgtgagagaagaccttcgtccccgtccagatgcgagagaatgaataaccctggaaaacaagttccgtttatgaggacggacatgctacaaaatatgttcgcggctaatcgcgataatgtagcttctagacttttgtcctaaaatactattatatccttttcgatattaataaatccgtgtcgtccaggttttttatctctttcagtatgtgaatagataggtattttatctctattcatcatcgaatttaagagatccgataaacattgtttgtattctccagatgtcagcatctgatacaacaatatatgtgcacataaacctctggcacttatttcatgtaccttccccttatcactaaggagaatagtatttgagaaatatgtatacatgatattatcatgaattagatatacagaatttgtaacactctcgaaatcacacgatgtgtcggcgttaagatctaatatatcactcgataacacattttcatctagatacactagacattttttaaagctaaaatagtctttagtagtaacagtaactatgcgattattttcatcgatgatacatttcatcggcatattattacgcttaccatcaaagactataccatgtgtatatctaacgtattctagcatggttgccatacgcgcattaaacttttcaggatctttggatagatcttccaatctatctatttgagaaaacatttttatcatgttcaatagttgaaacgtcggatccactatatagatattatctataaagattttaggaactacgttcatggtatcctggcgaatattaaaactatcaatgatatgattatcgttttcatcttttatcaccatatagtttctaagatatgggattttacttaatataatattatttcccgtgataaattttattagaaaggccaaatctataagaaaagtcctagaattagtctgaagaatatctatatcgccgtatagtatatttggattaattagatatagagaatatgatccgtaacatatacaacttttattatggcgtctaagatattcttccatcaacttattaacatttttgactagggaagatacattatgacgtcccattacttttgccttgtctattactgcgacgttcatagaatttagcatatctcttgccaattcttccattgatgttacattataagaaattttagatgaaattacatttggagctttaatagtaagaactcctaatatgtccgtgtatgtggtcactaatacagattgtagttctataatcgtaaataatttacctatattatatgtttgagtctgtttagaaaagtagctaagtatacgatcttttatttctgatgcagatgtattaacatcggaaaaaaatctttttttattcttttttactaaagatacaaatatgtctttgttaaaaacagttattttctgaatatttctagcttgtaattttaacatatgatattcgttcacactaggtactctgcctaaataggtttctataatctttaatgtaatattaggaaaagtattctgatcaggattcctattcattttgaggatttaaaactctgattattgtctaatatggtctctacgcaaactttttcacagagcgatagagtttttgataactcgtttttcttaagaaatataaaactactgtctccagagctcgctctatcttttattttatctaattcgatacaaactcctgatactggttcagaaagtaattcattaattttcagtcctttatagaagatatttaatatagataatacaaaatcttcagtttttgatatcgatctgattgatcctagaactagatatattaataacgtgctcattaggcagtttatggcagcttgataattagatatagtatattccagttcatatttattagataccgcattgcccagattttgatattctatgaattcctctgaaaataaatccaaaataactagacattctattttttgtggattagtgtactctcttccctctatcatgttcactactggtgtccacgatgataaatatctagagggaatataatatagtccataggatgccaatctagcaatgtcgaataactgtaattttattcttcgctcttcattatgaattgattcttgaggtataaacctaacacaaattatattattagacttttcgtatgtaatgtctttcatgttataagtttttaatcctggaatagaatctattttaatgaggcttttaaacgcagagttctccaacgagtcaaagcataatactctgttgtttttcttatatacgatgttacgattttcttctttgaatggaataggtttttgaattagtttataattacaacataatagataaggaagtgtgcaaatagtacgcggaaaaaacataatagctcccctgttttcatccatggttttaagtaaatgatcactggcttctttagtcaatggatattcgaacattaaccgtttcatcatcattggacagaatccatatttcttaatgtaaagagtgatcaaatcattgtgtttattgtaccatcttgttgtaaatgtgtattcggttatcggatctgctcctttttctattaaagtatcgatgtcgatctcgtctaagaattcaactatatcgacatatttcatttgtatacacataaccattactaacgtagaatgtataggaagagatgtaacgggaacagggtttgttgattcgcaaactattctaatacataattcttctgttaatacgtcttgcacgtaatctattatagatgccaagatatctatataattattttgtaagatgatgttaactatgtgatctatataagtagtgtaataattcatgtatttcgatatatgttccaactctgtctttgtgatgtctagtttcgtaatatctatagcatcctcaaaaaatatattcgcatatattcccaagtcttcagttctatcttctaaaaaatcttcaacgtatggaatataataatctattttacctcttctgatatcattaatgatatagtttttgacactatcttctgtcaattgattcttattcactatatctaagaaacggatagcgtccctaggacgaactactgccattaatatctctattatagcttctggacataattcatctattataccagaattaatgggaactattccgtatctatctaacatagttttaagaaagtcagaatctaagacttgatgttcatatattggttcatacatgaaatgatctctattgatgatagtgactatttcattctctgaaaattggtaactcattctatatatgctttccttgttgatgaaggatagaatatactcaatagaatttgtaccaacaaactgttctcttatgaatcgtatatcatcatctgaaataatcatgtaaggcatacatttaacaattagagacttgtctcctgttatcaatatactattcttgtgataatttatgtgtgaggcaaatttgtccacgttctttaattttgttatagtagatatcaaatccaatggagctacagttcttggcttaaacagatatagtttttctggaacaaattctacaacattattataaaggactttgggtaaataagtgggatgaaatcctattttaattaatgcgatagccttgtcctcgtgcagatatccaaacgcttttgtgatagtatggcattcattgtctagaaacgctctacgaatatctgtgacagatatcatctttagagaatatactagtcgcgttaatagtactacaatttgtattttttaatctatctcaataaaaaaattaatatgtatgattcaatgtataactaaactactaactgttattgataactagaatcagaatctaatgatgacgtacccaagaagtttatctactgccaatttagctgcattatttttagcatctcgtttagattttccatctgccttatcgaatactcttccgtcgatatctacacaggcataaaatgtaggagagttactaggcccaactgattcaatacgaaaagaccaatctctcttagttatttggcagtactcattaataacggtgacagggttagcatctttccaatcaataatttttttagccggaataacatcatcaaaagacttatgatcctctctcattgatttttcgcgggatacatcatctattatgacgtcagccataacatcagcatccggcttatccgcctccgttgtcataaaccaacgaggaggaatatcgtcggagctgtacaccatagcactacgttgaagatcgtacagagctttattaacttctcgcttctccatattaagttgtctagttagttgtgcagcagtagctccttcgattccaatggttttaatagcctcacacacaatctctgcgttagaacgttcgtcgatatagattttagacatttttagagagaactaacacaaccagcaataaaactgaacctactttatcatttttttattcatcatcctctggtggttcgtcgttcctatcaaatgtagctctgattaacccgtcatctataggtgatgctggttctggagattctggaggagatggattattatctggaagaatctctgttatttccttgttttcatgtatcgattgcgttgtaacattaagattgcgaaatgctctaaatttgggaggcttaaagtgttgtttgcaatctctacacgcgtgtctaactagtggaggttcgtcagctgctctagtttgaatcatcatcggcgtagtattcctacttttacagttaggacacggtgtattgtatttctcgtcgagaacgttaaaataatcgttgtaactcacatcctttattttatctatattgtattctactcctttcttaatgcattttataccgaataagagatagcgaaggaattctttttcggtgccgctagtacccttaatcatatcacatagtgttttatattccaaatttgtggcaatagacggtttatttctatacgatagtttgtttctggaatcctttgagtattctataccaatattattctttgattcgaatttagtttcttcgatattagattttgtattacctatattcttgatgtagtactttgatgatttttccatggcccattctattaagtcttccaagttggcatcatccacatattgtgatagtaattctcggatatcagtagcggctaccgccattgatgtttgttcattggatgagtaactactaatgtatacattttccatttataacacttatgtattaactttgttcatttatattttttcattattatgttgatattaacaaaagtgaatatatatatatgttaataattgtattgtggttatacggctacaattttataatgagtgaaagtcagtgtccgatgatcaatgacgatagctttactctgaaaagaaagtatcaaatcgatagtgcggagtcaacaataaaaatggataagaagaggataaagtttcagaatagagccaaaatggtaaaagaaataaatcagacaataagagcagcacaaactcattacgagacattgaaactaggatacataaaatttaagagaatgattaggactactactctagaagatatagcaccatctattccaaataatcagaaaacttataaactattctcggacatttcagccatcggcaaagcatcacagaatccgagtaagatggtatatgctctgctgctttacatgtttcccaatttgtttggagatgatcatagattcattcgttatagaatgcatccaatgagtaaaatcaaacacaagatcttctctcctttcaaacttaatcttattagaatattagtggaagaaagattctataataatgaatgcagatctaataaatggaaaataattggaacacaagttgataaaatgttgatagctgaatctgataaatatacaatagatgcaaggtataacctaaaacccatgtatagaatcaagggagaatctgaagaagataccctcttcatcaaacagatggtagaacaatgtgtgacatcccaggaattggtggaaaaagtgttgaagatactgtttagagatttgttcaagagtggagaatacaaagcgtacagatacgatgatgatgtagaaaatggattcattggattggatacactaaaattaaacattgttcatgatatagttgaaccatgtatgcctgttcgtaggccagtggctaagatactgtgtaaagaaatggtaaataaatactttgagaatccgctacatattattggtaaaaatcttcaagagtgcattgactttgttagtgaataggcatttcatctttctccaatactaattcaaattgttaaattaataatggatagtataaatagttattagttataagatagtaaaaataattattagaataagagtgtagtatcatagataactctcttctataaaaatggattttattcgtagaaagtatcttatatacacagtagaaaataatatagattttttaaaggatgatacattaagtaaagtaaacaattttaccctcaatcatgtactagctctcaagtatctagttagcaattttcctcaacacgttattactaaggatgtattagctaataccaatttttttgttttcatacatatggtacgatgttgtaaagtgtacgaagcggttttacgacacgcatttgatgcacccacgttgtacgttaaagcattgactaagaattatttatcgtttagtaacacaatacaatcgtacaaggaaaccgtgcataaactaacacaagatgaaaaatttttagaggttgccgaatacatggacgaattaggagaacttataggcgtaaattatgacttagttcttaatccattatttcacggaggggaacccatcaaagatatggaaatcatttttttaaaactgtttaagaaaacagacttcaaagttgttaaaaaattaagtgttataagattacttatttgggcatacctaagcaagaaagatacaggcatagagtttgcggataatgatagacaagatatatatactctatttcaacaaactggtagaatcgtccatagcaatctaacagaaacgtttagagattatatctttcccggagataagactagctattgggtgtggttaaacgaaagtatagctaatgatgcggatatcgttcttaatagacacgccattaccatgtatgataaaattcttagttatatatactctgagataaaacaaggacgcgttaataaaaacatgcttaagttagtttatatctttgagcctgaaaaagatatcagagaacttctgctagaaatcatatatgatattcctggagatatcctatctattattgatgcaaaaaacgacgattggaaaaaatattttattagtttttataaagctaattttattaacggtaatacatttattagtgatagaacgtttaacgaggacttattcagagttgttgttcaaatagatcccgaatatttcgataatgaacgaattatgtctttattctctacgagtgctgcggacattaaacgatttgatgagttagatattaataacagttatatatctaatataatttatgaggtgaacgatatcacattagatacaatggatgatatgaagaagtgtcaaatctttaacgaggatacgtcgtattatgttaaggaatacaatacatacctgtttttgcacgagtcggatcccatggtcatagagaacggaatactaaagaaactgtcatctataaaatccaagagtagacggctgaacttgtttagcaaaaacattttaaaatattatttagacggacaattggctcgtctaggtcttgtgttagatgattataaaggagacttgttagttaaaatgataaaccatcttaagtctgtggaggatgtatccgcattcgttcgattttctacagataaaaaccctagtattcttccatcgctaatcaaaactattttagctagttataatatttccatcatcgtcttatttcaaaggtttttgagagataatctatatcatgtagaagaattcttggataaaagcatccatctaaccaagacggataagaaatatatacttcaattgataagacacggtagatcatagaacagaccaaatatattattaataatttggtatatacatagatataattatcacacatttttgataaatgggaactgctgcaacaattcagactcccaccaaattaatgaataaagaaaatgcagaaatgattttggaaaaaattgttgatcatatagttatgtatattagtgacgaatcaagtgattcagaaaataatcctgaatatattgattttcgtaacagatacgaagactatagatctctcattataaaaagtgatcacgagtttgtaaagctatgtaaaaatcatgcggagaaaagttctccagaaacgcaacaaatgattatcaaacacatatacgaacaatatcttattccagtatctgaagtactattaaaacctataatgtccatgggtgacataattacatataacggatgtaaagacaatgaatggatgctagaacaactctctaccctaaactttaacaatctccgcacatggaactcatgtagcataggcaatgtaacgcgtctgttttatacattttttagttatctgatgaaagataaactaaatatataagtataatcccattctaatactttaacctgatgtattagcatcttattagaatattaacctaactaaaagacataacataaaaactcattacatagttgataaaaagcggtaggatataaatattatggctgccaccgttccgcgttttgacgacgtgtacaaaaatgcacaaagaagaattctagatcaagaaacattttttagtagaggtctaagtagaccgttaatgaaaaacacatatctatttgataattacgcgtatggatggataccagaaactgcaatttggagtagtagatacgcaaacttagatgcaagtgactattatcccatttcgttgggattacttaaaaagttcgagtttctcatgtctctatataaaggtcctattccagtatacgaagaaaaagtaaatactgaattcattgctaatggatctttctccggtagatacgtatcatatcttagaaagttttctgctcttccaacaaacgagtttattagttttttgttactgacttccattccaatctataatatcttgttctggtttaaaaatactcagtttgatattactaaacacacattattcagatacgtctatacagataatgccaaacacctggcgttggctaggtatatgtatcaaacaggagactataagcctttgtttagtcgtctcaaagagaattatatatttaccggtcccgttccaatatgtatcaaagatatagatcaccctaatcttagtagagcaagaagtccatccgattatgagacattagctaatattagtactatattgtactttaccaagtatgatccggtattaatgtttttattgttttacgtacctgggtattcaattactacaaaaattactccagccgtagaatatctaatggataaactgaatctaacaaagagcgacgtacaactgttgtaaattattttatgcttcgtaaaatgtaggttttgaaccaaacattctttcaaagaatgagatgcataaaactttattatccaatagattgactatttcggacgtcaatcgtttaaagtaaacttcgtaaaatattctttgatcactgccgagtttaaaacttctatcgataattgtttcatatgttttaatatttacaagttttttggtccatggtccattaggacaaatatatgcaaaataatatcgttctccaagttctatagtctctggattatttttattatattcagtaaccaaatacatattagggttatctgcggatttataatttgagtgatgcattcgactcaacataaataattctagaggagacgatctactatcaaattcggatcgtaaatctgtttctaaagaacggagaatatctatacatacctgattagaattcatccgtccttcagacaacatctcagacagtctggttttgtacatcttaatcatattcttatgaaacttggaaacatctcttctagtttcactagtacctttattaattctctcaggtacagattttgaattcgacgatgctgagtatttcatcgttgtatatttcttcttcgattgcataatcagattcttatataccgcctcaaactctattttaaaattattaaacaatactctattattaatcagtcgttctaactctttcgctatttctatagacttatctacatcttgactgtctatctctgtaaacacggagtcggtatctccatacacgctacgaaaacgaaatctgtaatctataggcaacgatgttttcacaatcggattaatatctctatcgtccatataaaatggattacttaatggattggcaaaccgtaacataccgttagataactctgctccatttagtaccgattctagatacaagatcattctacgtcctatggatgtgcaactcttagccgaagcgtatgagtatagagcactatttctaaatcccatcagaccatatactgagttggctactatcttgtacgtatattgcatggaatcatagatggccttttcagttgaactggtagcctgttttagcatctttttatatctggctctctctgccaaaaatgttcttaatagtctaggaatggttccttctatcgatctatcgaaaattgctatttcagagatgaggttcggtagtctaggttcacaatgaaccgtaatatatctaggaggtggatatttctgaagcaatagctgattatttatttcttcttccaatctattggtactaacaacgacaccgactaatgtttccggagatagatttccaaagatacacacattaggatacagactgttataatcaaagattaatacattattactaaacattttttgttttggagcaaataccttaccgccttcataaggaaacttttgttttgtttctgatctaactaagatagttttagtttccaacaatagctttaacagtggacccttgatgactgtactcgctctatattcgaataccatggattgaggaagcacatatgttgacgcacccgcgtctgtttttgtttctactccataatactcccacaaatactgacacaaacaagcatcatgaatacagtatctagccatatctaaagctatgtttagattataatccttatacatctgagctaaatcaacgtcatcctttccgaaagataatttatatgtatcattaggtaaagtaggacataatagtacgactttaaatccattttcccaaatatctttacgaattactttacatataatatcctcatcaacagtcacataattacctgtggttaaaacctttgcaaatgcagcggctttgcctttcgcgtctgtagtatcgtcaccgatgaacgtcatttctctaactcctctatttaatactttacccatgcaactgaacgcgttcttggatatagaatccaatttgtacgaatccaatttttcaaatttttgaatgaatgaatatagatcgaaaaatatagttccattattgttattaacgtgaaacgtagtattggccatgccgcctactcccttatgactagactgatttctctcataaatacagagatgtacagcttcctttttgtccggagatctaaagataattttctctcctgttaataactctagacgattagtaatatatctcagatcaaagttatgtccgttaaaggtaacgacgtagtcgaacgttagttccaacaattgtttagctattcgtaacaaaactatttcagaacatagaactagttctcgttcgtaatccatttccattagtgactgtatcctcaaacatcctctatcgacggcttcttgtatttcctgttccgttaacatctcttcattaatgagcgtaaacaataatcgtttaccacttaaatcgatataacagtaacttgtatgcgagattgggttaataaatacagaaggaaacttcttatcgaagtgacactctatatctagaaataagtacgatcttgggatatcgaatctaggtatttttttagcgaaacagttacgtggatcgtcacaatgataacatccattgttaatctttgtcaaatattgctcgtccaacgagtaacatccgtctggagatatcccgttagaaatataaaaccaactaatattgagaaattcatccatggtggcattttgtatgctgcgtttctttggctcttctatcaaccacatatctgcgacggagcattttctatctttaatatctagattataacttattgtctcgtcaatgtctatagttctcatctttcccaacggcctcgcattaaatggaggaggagacaatgactgatatatttcgtccgtcactacgtaataaaagtaatgaggaaatcgtataaatacggtctcaccatttcgacatctggatttcagatataaaaatctgttttcaccgtgactttcaaaccaattaatgcaccgaacatccatttatagaatttagaaatatattttcatttaaatgaatcccaaacattggggaagagccgtatggaccattatttttatagtactttcgcaagcgggtttagacggcaacatagaagcgtgtaaacgaaaactatatactatagttagcactcttccatgtcctgcatgtagacggcacgcgactatcgctatagaggacaataatgtcatgtctagcgatgatctgaattatatttattattttttcatcagattatttaacaatttggcatctgatcccaaatacgcgatcgatgtgacaaaggttaaccctttataaacttaacccattataaaacttatgattagtcacaactgaaataaccgcgtgattattttttggtataattctacacggcatggtttctgtgactatgaattcaacccccgttacattagtgaaatctttaacaaacagcaagggttcgtcaaagacataaaactcattgtttacaatcgaaatagaccccctatcacacttaaaataaaaaatatccttatcctttaccaccaaataaaattctgattggtcaatgtgaatgtattcacttaacagttccacaaatttatttattaactccgaggcacatacatcgtcggtattttttatggcaaactttactcttccagcatccgtttctaaaaaaatattaacgagttccatttatatcatccaatattattgaaatgacgttgatggacagatgatacaaataagaaggtacggtacctttgtccaccatctcctccaattcatgctctattttgtcattaactttaatgtatgaaaacagtacgccacatgcttccatgacagtgtgtaacactttggatacaaaatgtttgacattagtataattgttcaagactgtcaatctataatagatagtagctataatatattctatgatggtattgaagaagatgacaaccttggcatattgatcatttaacacagacatggtatcaacagatagcttgaatgaaagagaatcagtaattggaataagcgtcttctcgatagagtgtccgtataccaacatgtctgatattttgatgtattccattaaattatttagttttttctttttattctcgttaaacagcatttctgtcaacggaccccaacatcgttgaccgattaagttttgattgatttttccgtgtaaggcgtatctagtcagatcgtatagcctatccaataatccatcatctgtgcgtagatcacatcgtacactttttaattctctatagaagagcgacagacatctggagcaattacagacagcaatttctttattctctacagatgtaagatacttgaagacattcctatgatgatgcagaattttggataacacggtattgatggtatctgttaccataattcctttgatggctgatagtgtcagagcacaagatttccaatctttgacaatttttagcaccattatctttgttttgatatctatatcagacagcatggtgcgtctgacaacacagggattaagacggaaagatgaaatgattctctcaacatcttcaatagataccttgctattttttctggcattatctatatgtgcgagaatatcctctagagaatcagtatcctttttgatgatagtggatctcaatgacatgggacgtttaaaccttcttattctatcaccagattgcatggtgatttgtcttctttcttttatcataatgtaatctctaaattcatcggcaaattgtctatatctaaaatcataatatgagatgtttacctctacaaatatctgttcgtccaatgttagagtatttacatcagttttgtattccaaattaaacatggcaacggatttaattttatattcctctattaagtcctcgtcgataataacagaatgtagataatcatttaatccatcgtacatggttggaagatgcttgttgacaaaatctttaattgtcttgatgaaggtgggactatatctaacatcttgattaataaaatttataacattgtccataggatactttgtaactagttttatacacatctcttcatcggtaagtttagacagaatatcgtgaacaggtggtatattatattcatcagatatacgaagaacaatgtccaaatctatattgtttaatatattatatagatgtagcgtagctcctacaggaatatctttaactaagtcaatgatttcatcaaccgttagatctattttaaagttaatcatataggcattgatttttaaaaggtatgtagccttgactacattctcattaattaaccattccaagtcactgtgtgtaagaagattatattctatcataagcttgactacatttggtcccgataccattaaagaattcttatgatataaggaaacagcttttaggtactcatctactctacaagaattttggagagccttaacgatatcagtgacgtttattatttcaggaggaaaaaacctaacattgagaatatcggaattaatagcttccagatacagtgattttggcaatagtccgtgtaatccataatccagtaacacgagctggtgcttgctagacaccttttcaatgtttaatttttttgaaataagctttgataaagccttcctcgcaaattccggatacatgaacatgtcggcgacatgattaagtattgttttttcattattttctcaataccccaatagatgatagaatatcacccaatgcgtccatgttgtctatttccaacaggtcgctatatccaccaatagaagtttttccaaaaaagattctaggaacagttctaccaccagtaatttgttcaaaatagtcacgcaattcattttcgggtttaaattctttaatatcgacaatttcatacgctcctcttttgaaactaaacttatttagaatatccagtgcatttctacaaaaaggacatgtatacttgacaaaaattgtcactttgttattggccaacctttgttgtacaaattcctcggccattttaatatttaagtgatataaaactatctcgacttatttaactctttagtcgagatatatggacgcagatagctatatgatagccaactacagaaggcaaacgctataaaaaacataattacgacgagcatatttataaatatttttattcagcattacttgatatagtaatattaggcacagtcaaacattcaaccactctcgatacattaactctctcattttctttaacaaattctgcaatatcttcgtaaaaagattcttgaaactttttagaatatctatcgactctagatgaaatagcgttcgtcaacatactatgttttgtatacataaaggcgcccattttaacagtttctagtgacaaaatgctagcgatcctaggatcctttagaatcacatagattgacgattcgtctctcttagtaactctagtaaaataatcatacaatctagtacgcgaaataatattatccttgacttgaggagatctaaacaatctagttttgagaacatcgataagttcatcgggaatgacatacatactatctttaatagaactcttttcatccagttgaatggattcgtccttaaccaactgattaatgagatcttctattttatcattttccagatgatatgtatgtccattaaagttaaattgtgtagcgcttctttttagtctagcagccaatactttaacatcactaatatcgatatacaaaggagatgatttatctatggtattaagaattcgtttttcgacatccgtcaaaaccaattcctttttgcctgtatcatccagttttccatcctttgtaaagaaattattttctactagactattaataagactgataaggattcctccataattgcacaatccaaactttttcacaaaactagactttacaagatctacaggaatgcgtacttcaggttttttagcttgtgattttttcttttgcggacattttctagtaaccaactcatctaccatttcattgattttagcagtgaaataagctttcaatgcacgggcactgatactattgaaaacgagttgatcttcaaattccgccatttaagttcaccaaacaacttttaaatacaaatatatcaatagtagtagaataagaactataaaaaaaataataattaaccaataccaaccccaacaaccggtattattagttgatgtgactgttttctcatcacttagaacagatttaacaatttctataaagtctgtcaaatcatcttccggagaccccataaatacaccaaatatagcggcgtacaacttatccatttatacattgaatattggcttttctttatcgctatcttcatcatattcatcatcaatatcaacaagtcccagattacgagccagatcttcttctacattttcagtcattgatacacgttcactatctccagagagtccgataacgttagccaccacttctctatcaatgattagtttcttgagcgcgaaagtaatttttgtttccgttccggatctatagaagacgataggtgtgataattgccttagccaattgtctttctcttttactgagtgattctagttcaccttctatagatctgagaatggatgattctccagtcgaaacatattctaccatggatccgtttaatttgttgatgaagatggattcatccttaaatgttttctctgtaatagtttccaccgaaagactatgcaaagaatttggaatgcgttccttgtgcttaatgtttccatagacggcttctagaagttgatacaacataggactagccgcggtaacttttatttttagaaagtatccatcgcttctatcttgtttagatttatttttataaagtttagtctctccttccaacataataaaagtggaagtcatttgactagataaactatcagtaagttttatagagatagacgaacaattagcgtattgagaagcatttagtgtaacgtattcgatacattttgcattagatttactaatcgattttgcatactctataacacccgcacaagtctgtagagaatcgctagatgcagtaggtcttggtgaagtttcaactctcttcttgattaccttactcatgattaaacctaaataattgtactttgtaatataatgatatatattttcactttatctcatttgagaataaaaatgtttttgtttaaccactgcatgatgtacagatttcggaatcgcaaaccaccagtggttttattttatccttgtccaatgtgaattgaatgggagcggatgcgggtttcgtacgtagatagtacattcccgtttttagaccgagactccatccgtaaaaatgcatactcgttagtttggaataactcggatctgctatatggatattcatagattgactttgatcgatgaaggctcccctgtctgcagccatttttatgatcgtcttttgtggaatttcccaaatagttttataaactcgcttaatatcttctggaaggtttgtattctgaatggatccaccatctgccataatcctattcttgatctcatcattccataattttctctcggttaaaactctaaggagatgcggattaactacttgaaattctccagacaatactctccgagtgtaaatattactggtatacggttccaccgactcattatttcccaaaatttgagcagttgatgcagtcggcataggtgccaccaataaactatttctaagaccgtatgttctgattttatcttttagaggttcccaattccaaagatccgacggtacaacattccaaagatcatattgtagaataccgttactggcgtacgatcctacatatgtatcgtatggtccttccttctcagctagttcacaactcgcctctaatgcaccgtaataaatggtttcgaagatcttcttatttagatcttgtgcttccaggctatcaaatggataatttaagagaataaacgcgtccgctaatccttgaacaccaataccgataggtctatgtctcttattagagatttcagcttctggaataggataataattaatatctataattttattgagatttctgacaattactttgaccacatccttcagtttgagaaaatcaaatcgcccatctattacaaacatgttcaaggcaacagatgccagattacaaacggctacctcattagcatccgcatattgtattatctcagtgcaaagattactacacttgatagttcctaaattttgttgattactctttttgttacacgcatccttataaagaatgaatggagtaccagtttcaatctgagattctataatcgctttccagacgactcgagcctttattatagatttgtatctcctttctctttcgtatagtgtatacaatcgttcgaactcgtctccccaaacattgtccaatccaggacattcatccggacacatcaacgaccactctccgtcatccttcactcgtttcataaagagatcaggaatccaaagagctataaatagatctctggttctatgttcctcgtttcctgtattctttttaagatcgaggaacgccataatatcagaatgccacggttccaagtatatggccataactccaggccgtttgtttcctccctgatctatgtatctagcggtgttattataaactctcaacattggaataataccgtttgatataccattggtaccggagatatagcttccactggcacgaatattactaattgatagacctattccccctgccattttagagattaatgcgcatcgttttaacgtgtcatagataccctctatgctatcatcgatcatgttaagtagaaaacagctagacatttggtgacgactagttcccgcattaaataaggtaggagaagcgtgcgtaaaccatttttcagaaagtagattgtacgtctcaatagctgagtctatatcccattgatgaattcctactgcgacacgcattaacatgtgctgaggtctttcaacgatcttgttgtttattttcaacaagtaggatttttccaaagttttaaaaccaaaatagttgtatgaaaagtctcgttcgtaaataataaccgagttgagtttatccttatatttgttaactatatccatggtgatacttgaaataatcggagaatgtttcccatttttaggattaacatagttgaataaatcctccatcacttcactaaatagtttttttgtttccttgtgtagatttgatacggctattctggcggctagaatggcataatccggatgttgtgtagtacaagtggctgctatttcggctgccagagtgtccaattctaccgttgttactccattatatattccttgaataaccttcatagctattttaataggatctatatgatccgtgtttaagccataacataattttctaatacgagacgtgattttatcaaacatgacattttccttgtatccatttcgtttaatgacaaacatttttgttggtgtaataaaaaaattatttaacttttcattaatagggatttgacgtatgtagcgtacaaaatgatcgttcctggtatatagataaagagtcctatatatttgaaaatcgttacggctcgattaaactttaatgattgcatagtgaatatatcattaggatttaactccttgactatcatggcggcgccagaaattaccatcaaaagcattaatacagttatgccgatcgcagttaaaacggttatagcatccaccatttatatctaaaaattagatcaaagaatatgtgacaaagtcctagttgtatactgagaattgacgaaacaatgtttcttacatatttttttcttattagtaactgacttaatagtaggaactggaaagctagacttgattattctataagtatagatacccttccagataatgttctctttgataaaagttccagaaaatgtagaattttttaaaaagttatcttttgctattaccaagattgtgtttagacgcttattattaatatgagtgatgaaatccacaccgcctctagatatcgcctttatttccacattagatggtaaatccaatagtgaaactatctttttaggaatgtatggactcgcgtttagaggagtgaacgtcttgggcgtcggaaaggatgattcgtcaaacgaataaacaatttcacaaatggatgttaatgtattagtaggaaattttttgacgctagtggaattgaagattctaatggatgatgttctacctatttcatccgataacatgttaatttccgacaccaacggttttaatatttcgatgatatacggtagtctctctttcggacttatatagcttattccacaatacgagtcattatatactccaaaaaacaaaataactagtataaaatctgtatcgaatgggaaaaacgaaattatcgacataggtatagaatccggaacattgaacgtattaatacttaattctttttctgtggtaagtaccgataggttattgacattgtatggttttaaatattctataacttgagacttgatagatattagtgatgaattgaaaattatttttatcaccacgtgtgtttcaggatcatcgtcgacgcccgtcaaccaaccgaatggagtaaaataaatatcattaatatatgctctagatattagtatttttattaatcctttgattatcatcttctcgtaggcgaatgattccatgatcaagagtgatttgagaacatcctccggagtattaatgggcttagtaaacagtccatcgttgcaataataaaagttatccaagttaaaggatattatgcattcgtttaaagatatcacctcatctgacggagacaattttttggtaggttttagagactttgaagctacttgtttaacaaagttattcatcgtcgtctactattctatttaattttgtagttaatttatcacatatcacattaattgactttttggtccatttttccatacgtttatattcttttaatcctgcgttatccgtttccgttatatccagggatagatcttgcaagttaaatagaatgctcttaaataatgtcattttcttatccgctaaaaatttaaagaatgtataaacctttttcagagatttgaaactcttaggtggtgtcctagtacacaatatcataaacaaactaataaacattccacattcagattccaacagctgattaacttccacattaatacagcctattttcgctccaaatgtacattcgaaaaatctgaataaaacatcgatgtcacaatttgtattatccaatacagaatgtttgtgattcgtgttaaaaccatcggagaaggaatagaaataaaaattattatagtggtggaattcagttggaatattgcctccggagtcataaaaggatactaaacattgttttttatcataaattacacatttccaatgagacaaataacaaaatccaaacattacaaatctagaggtagaacttttaattttgtctttaagtatatacgataagatatgtttattcataaacgcgtcaaatttttcatgaatcgctaaggagtttaagaatctcatgtcaaattgtcctatataatccacttcggatccataagcaaactgagagactaagttcttaatacttcgattgctcatccaggctcctctctcaggctctattttcatcttgacgacctttggattttcaccagtatgtattcctttacgtgataaatcatcgattttcaaatccatttgtgagaagtctatcgccttagatactttttcccgtagtcgaggtttaaaaaaatacgctaacggtatactagtaggtaactcaaagacatcatatatagaatggtaacgcgtctttaactcgtcggttaactctttcttttgatcgagttcgtcgctactattgggtctgctcaggtgccccgactctactagttccaacatcataccgataggaatacaagacactttgccggcggttgtagatttatcatatttttccactacatatccgttacaatttgttaaaaatttagatacatctatattgctacataatccagctagtgaatatatatgacataataaattggtaaatcctagttctggtattttactaattactaaatctgtatatctttccatttatcatggaaaagaatttaccagatatcttcttttttccaaactgcgttaatgtattctcttacaaatattcacaagatgaattcagtaatatgagtaaaacggaacgtgatagtttctcattggccgtgtttccagttataaaacatagatggcataacgcacacgttgtaaaacataaaggaatatacaaagttagtacagaagcacgtggaaaaaaagtatctcctccatcactaggaaaacccgcacacataaacctaaccgcgaagcaatatatatacagtgaacacacaataagctttgaatgttatagttttctaaaatgtataacaaatacagaaatcaattcgttcgatgagtatatattaagaggactattagaagctggtaatagtttacagatattttccaattccgtaggtaaacgaacagatactataggtgtactagggaataagtatccatttagcaaaattccattggcctcattaactcctaaagcacaacgagagatattttcagcgtggatttctcatagacctgtagttttaactggaggaaccggagtgggtaagacgtcacaggtacccaagttattgctttggtttaattatttatttggtggattctctactctagataaaattactgactttcacgaaagaccagtcattctatctcttcctaggatagctttagttagattgcatagcaataccattttaaaatcattgggatttaaggtactagatggatctcctatttctttacggtacggatctataccggaagaattaataaacaaacaaccaaaaaaatatggaattgtattttctacccataagttatctctaacaaaactatttagttatggcactcttattatagacgaagttcatgagcatgatcaaataggagatattattatagcagtagcgagaaagcatcatacgaaaatagattctatgtttttaatgactgccacattagaggatgaccgagaacggctaaaagtatttttacctaatcccgcatttatacatattcctggagatacactgtttaaaattagcgaggtatttattcataataagataaatccatcttccagaatggcatacatagaagaagaaaagagaaatttagttactgctatacagatgtatactcctcctgatggatcatccggtatagtctttgtggcatccgttgcacagtgtcacgaatataaatcatatttagaaaaaagattaccgtatgatatgtatattattcatggtaaggtcttagatatagacgaaatattagaaaaagtgtattcatcacctaatgtatcgataattatttctactccttatttggaatccagcgttactatacgcaatgttacacacatttatgatatgggtagagtttttgtccccgctccttttggaggatcgcaacaatttatttctaaatctatgagagatcaacgaaaaggaagagtaggaagagttaatcctggtacatacgtctatttctatgatctgtcttatatgaagtctatacagcgaatagattcagaatttctacataattatatattgtacgctaataagtttaatctaacactccccgaagatttgtttataatccctacaaatttggatattctatggcgtacaaaggaatatatagactcgttcgatattagtacagaaacatggaataaattattatccaattattatatgaagatgatagagtatgctaaactttatgtactaagtcctattctcgctgaggagttggataactttgagaggacgggagaattaactagtattgtacgagaagccattttatctctaaatttacgaattaagattttaaattttaaacataaagatgatgatacgtatatacacttttgtaaaatattattcggtgtctataacggaacaaacgctactatatattatcatagacctctaacgggatatatgaatatgatttcagatactatatttgttcctgtagataataactaaaaatcaaactctaatgaccacatctttttttagagatgaaaaattttccacatctccttttgtagacacgactaaacattttgcagaaaaaagtttattagtgtttagataatcgtatacttcatcagtgtagatagtaaatgtgaacagataaaaggtattcttgctcaatagattggtaaattccatagaatatattaatcctttcttcttgagatcccacatcatttcaaccagagacgttttatccaatgatttacctcgtactataccacatacaaaactagattttgcagtgacgtcgtacctggtattcctaccaaacaaaattttacttttagttcttttagaaaattctaaggtagaatctctatttgccaatatgtcatctatggaattaccactagcaaaaaatgatagaaatatatattgatacatcgcagctggttttgatctactatactttaaaaacgaatcagattccataattgcctgtatatcatcagctgaaaaactatgttttacacgtattccttcggcatttctttttaatgatatatcttgtttagacaatgataaagttatcatgtccatgagagacgcgtctccgtatcgtataaatatttcattagatgttagacgcttcattaggggtatacttctataaggtttcttaatcagtccatcattggttgcgtcaagaactactatcggatgttgttgggtatctctagtgttacacatggccttactaaagtttgggtaaataactatgatatctctattaattatagatgcatatatttcattcgtcaaggatattagtatcgacttgctatcgtcattaatacgtgtaatgtaatcatataaatcatgcgatagccaaggaaaatttaaatagatgttcatcatataatcgtcgctataattcatattaatacgttgacattgactaatttgtaatatagcctcgccacgaagaaagctctcgtattcagtttcatcgataaaggataccgttaaatataactggttgccgatagtctcatagtctattaagtggtaagtttcgtacaaatacagaatccctaaaatattatctaatgttggattaatctttaccataactgtataaaatggagacggagtcataactattttaccgtttgtacttactggaatagatgaaggaataatctccggacatgctggtaaagacccaaatgtctgtttgaagaaatccaatgttccaggtcctaatctcttaacaaaaattacgatattcgatcccgatatcctttgcattctatttaccagcatatcacgaactatattaagattatctatcatgtctattctcccaccgttatataaatcgcctccgctaagaaacgttagtatatccatacaatggaatacttcatttctaaaatagtattcgttttctaattctttaatgtgaaatcgtatactagaaagggaaaaattatctttgagttttccgttagaaaagaaccacgaaactaatgttctgattgcgtccgattccgttgctgaattaatggatttacaccaaaaactcatataacttctagatgtagaagcattcgctaaaaaattagtagaatcaaaggatataagtagatgttccaacaagtgagcaattcccaagatttcatctatatcattctcgaatccgaaattagaaattcccaagtagatatcctttttcatccgatcgttgatgaaaatacgaactttattcggtaagacaatcatttactaaggagtaaaataggaagtaatgttcgtatgtcgttatcatcgtataaattaaaggtgtgttttttaccattaagtgacattataattttaccaatattggaattataatataggtgtatttgcgcactcgcgacggttgatgcatcggtaaatatagctgtatctaatgttctagtcggtatttcatcatttcgctgtctaataatagcgttttctctatctgtttccattacagctgcctgaagtttattggtcggataatatgtaaaataataagaaatacatacgaataacaaaaataaaataagatataataaagatgccatttagagatctaattttgtttaacttgtccaaattcctacttacagaagatgaggaatcgttggagatagtgtcttccttatgtagaggatttgaaatatcttataatgacttgataacttactttccagataggaaataccataaatatatttataaagtatttgaacatgtagatttatcggaggaattaagtatggaattccatgatacaactctgagagatttagtctatcttagattgtacaagtattccaagtgtatacggccgtgttataaattaggagataatctaaaaggcatagttgttataaaggacaggaatatttatattagggaagcaaatgatgacttgatagaatatctcctcaaggaatacactcctcagatttatacatattctaatgagcgcgtccccataactggttcaaaattaattctttgtggattttctcaagttacatttatggcgtatacaacgtcgcatataacaacaaataaaaaggtagatgttctcgtttccaaaaaatgtatagatgaactagtcgatccaataaattatcaaatacttcaaaatttatttgataaaggaagcggaacaataaacaaaatactcaggaagatattttattcggtaacaggtggccaaactccataggtagctttttctatttcggattttagaatttccaaattcaccagcgatttatcggttttggtgaaatccaaggatttattaatgtccacaaatgccatttgttttgtctgtggattgtatttgaaaatggaaacgatgtagttagatagatgcgctgcaaagtttcctattagggttccgcgctttacgtcacccagcatacttgaatcaccatcctttaaaaaaaatgataagatatcaacatggagtatatcatactcggattttaattcttctactgcatcactgacattttcacaaatactacaatacggtttaccgaaaataatcagtacgttcttcatttatgggtatcaaaaacttaaaatcgttactgctggaaaataaatcactgacgatattagatgataatttatacaaagtatacaatggaatatttgtggatacaatgagtatttatatagccgtcgccaattgtgtcagaaacttagaagagttaactacggtattcataaaatacgtaaacggatgggtaaaaaagggagggcatgtaaccctttttatcgatagaggaagtataaaaattaaacaagacgttagagacaagagacgtaaatattctaaattaaccaaggacagaaaaatgttagaattagaaaagtgtacatccgaaatacaaaatgttaccggatttatggaagaagaaataaaggcagaaatgcaattaaaaatcgataaactcacatttcaaatatatttatctgattctgataacataaaaatatcattgaatgagatactaacacatttcaacaataatgagaatgttacattattttattgtgatgaacgagacgcagaattcgttatgtgtctcgaggctaaaacacatttctctaccacaggagaatggccgttgataataagtaccgatcaggatactatgctatttgcatctgctgataatcatcctaagatgataaaaaacttaactcaactgtttaaatttgttccctcggcagaggataactatttagcaaaattaacggcgttagtgaatggatgtgatttctttcctggactctatggggcatctataacacccaccaacttaaacaaaatacaattgtttagtgattttacaatcgataatatagtcactagtttggcaattaaaaattattatagaaagactaactctaccgtagacgtgcgtaatattgttacgtttataaacgattacgctaatttagacgatgtctactcgtatattcctccttgtcaatgcactgttcaagaatttatattttccgcattagatgaaaaatggaatgaatttaaatcatcttatttagaaagcgtgccgttaccctgccaattaatgtacgcgttagaaccacgcaaggagattgatgtttcagaagttaaaactttatcatcttatatagatttcgaaaatactaaatcagatatcgatgttataaaatctatatcctcgatcttcggatattctaacgaaaactgtaacacgatagtattcggcatctataaggataatttactactgagtataaataattcattttactttaacgatagtctgttaataaccaatactaaaagtgataatataataaatataggttactagattaaaaatggtgttccaactcgtgtgctctacatgcggtaaagatatttctcacgaacgatataaattgattatacgaaaaaaatcattaaaggatgtactcgtcagtgtaaagaacgaatgttgtaggttaaaattatctacacaaatagaacctcaacgtaacttaacagtgcaacctctattggatataaactaatatggatccggttaattttatcaagacatatgcgcctagaggttctattatttttattaattataccatgtcattaacaagtcatttgaatccatcgatagaaaaacatgtgggtatttattatggtacgttattatcggaacacttggtagttgaatctacctatagaaaaggagttcgaatagtcccattggatagtttttttgaaggatatcttagtgcaaaagtatacatgttagagaatattcaagttatgaaaatagcagctgatacgtcattaactttattgggtattccgtatggatttggtcataatagaatgtattgttttaaattggtagctgactgttataaaaatgccggtattgatacatcgtctaaacgaatattgggcaaagatatttttctgagccaaaacttcacagacgataatagatggataaagatatatgattctaataatttaacattttggcaaattgattaccttaaagggtgagttaatatgcataactactcctccgttgttttttccctcgttctttttcttaacgttgtttgccatcactctcataatgtaaagatattctaaaatggtaaacttttgcatatcggacgcagaaattggtataaatgttgtaattgtattatttcccgtcaatggactagtcacagctccatcagttttatatcctttagagtatttctcactcgtgtctaacattctagagcattccatgatctgtttatcgttgatattggccggaaagatagattttttattttttattatattactattggcaattgtagatataacttctggtaaatatttttctaccttttcaatctcttctattttcaagccggctatatattctgctatattgttgctagtatcaataccttttctggctaagaagtcatatgtggtattcactatatcagttttaactggtagttccattagcctttccacttctgcagaataatcagaaattggttctttaccagaaaatccagctactataataggctcaccgatgatcattggcaaaatcctatattgtaccagattaatgagagcatatttcatttccaataattctgctagttcttgagacattgatttatttgatgaatctagttggttctctagatactctaccatttctgccgcatacaataacttgttagataaaatcagggttatcaaagtgtttagcgtggctagaatagtgggcttgcatgtattaaagaatgcggtagtatgagtaaaccgttttaacgaattatatagtctccagaaatctgtggcgttacatacatgagccgaatgacatcgaagattgtccaatatttttaatagctgctctttgtccattatttctatatttgactcgcaacaattgtagataccattaatcaccgattcctttttcgatgccggacaatagcacaattgtttagctttggactctatgtattcagaattaatagatatatctctcaatacagattgcactatacattttgaaactatgtcaaaaattgtagaacgacgctgttctgcagccatttaactttaaataatttacaaaaatttaaaatgagcatccgtataaaaatcgataaactgcgccaaattgtggcatatttttcagagttcagtgaagaagtgtctataaatgtagactcgacggatgagttaatgtatatttttgccgccttgggcggatctgtaaacatttgggcaattatacctctaagtgcatcagtgttttaccgaggagccgaaaatattgtgtttaatcttcctgtgtccaaggtaaaatcgtgtttgtgtagttttcacaatgatgccatcatagatatagaacctgatctggaaaataatctagtaaaactttctagttatcatgtagtaagtgtcgattgtaacaaggaactgatgcctattaggacagatactactatttgtctaagtatagatcaaaagaaatcttacgtgtttaattttcacaagtatgaagaaaaatgttgtggtagaaccgtcattcatctagaatggttgttgggctttatcaagtgtattagtcagcatcagcatctggctattatgtttaaagatgacaatattattatgaagactcctggtaatactgatgcgttttccagggaatattctatgactgaatgttctcaagaactacaaaagttttctttcaaaatagctatctcgtctctcaacaaactacgaggattcaaaaagagagtcaatgtttttgaaactagaatcgtaatggataatgacgataacattttaggaatgttgttttcggatagagttcaatcctttaagatcaacatctttatggcgtttttagattaatactttcaatgagataaatatgggtggcggagtaagtgttgagctccctaaacgggatccgcctccgggagtacccactgatgagatgttattaaacgtggataaaatgcatgacgtgatagctcccgctaagcttttagaatatgtgcatataggaccactagcaaaagataaagaggataaagtaaagaaaagatatccagagtttagattagtcaacacaggacccggtggtctttcggcattgttaagacaatcgtataatggaaccgcacccaattgctgtcgcacttttaatcgtactcattattggaagaaggatggaaagatatcagataagtatgaagagggtgcagtattagaatcgtgttggccagacgttcacgacactggaaaatgcgatgttgatttattcgactggtgtcagggggatacgttcgatagaaacatatgccatcagtggatcggttcagcctttaataggagtaatagaactgtagagggtcaacaatcgttaataaatctgtataataagatgcaaacattatgtagtaaagatgctagtgtaccaatatgcgaatcatttttgcattatttacgcgcacacaatacagaagatagcaaagagatgatcgattatattctaagacaacagtctgcggactttaaacagaaatatatgagatgtagttatcccactagagataagttagaagagtcattaaaatatgcggaacctcgagaatgttgggatccagagtgttcgaatgccaatgttaatttcttactaacacgtaattataataatttaggactttgcaatattgtacgatgtaataccagcgtgaacaacttacagatggataaaacttcctcattaagattgtcatgtggattaagcaatagtgatagattttctactgttcccgtcaatagagcaaaagtagttcaacataatattaaacactcgttcgacctaaaattgcatttgatcagtttattatctctcttggtaatatggatactaattgtagctatttaaatgggtgccgcggcaagcatacagacgacggtgaatacactcagcgaacgtatctcgtctaaattagaacaagaagcgaacgctagtgctcaaacaaaatgtgatatagaaatcggaaatttttatatccgacaaaaccatggatgtaacctcactgttaaaaatatgtgctctgcggacgcggatgctcagttggatgctgtgttatcagccgctacagaaacatatagtggattaacaccggaacaaaaagcatacgtgccagctatgtttactgctgcgttaaacattcagacgagtgtaaacactgttgttagagattttgaaaattatgtgaaacagacttgtaattctagcgcggtcgtcgataacaaattaaagatacaaaacgtaatcatagatgaatgttacggagccccaggatctccaacaaatttggaatttattaatacaggatctagcaaaggaaattgtgccattaaagcgttgatgcaattgacgactaaggccactactcaaatagcacctagacaagttgctggtacaggagttcagttttatatgattgttatcggtgttataatattggcagcgttgtttatgtactatgccaagcgtatgttgttcacatccaccaatgataaaatcaaacttattttagccaataaggaaaacgtccattggactacttacatggacacattctttagaacttctccgatggttattgctaccacggatatgcaaaactgaaaatatattgataatattttaatagattaacatggaagttatcgctgatcgtctagacgatatagtgaaacaaaatatagcggatgaaaaatttgtagattttgttatacacggtctagagcatcaatgtcctgctatacttcgaccattaattaggttgtttattgatatactattatttgttatagtaatttatatttttacggtacgtctagtaagtagaaattatcaaatgttgttggtggtgctagtcatcacattaactattttttattactttatactataatagtactagactgacttctaacaaacatctcacctgccataaataaatgcttgatattaaagtcttctatttctaacactattccatctgtggaaaataatactctgacattatcgctaattgacacatcggtgagtgatatgcctataaagtaataatcttctttgggcacatataccagtgtaccaggttctaacaacctatttactggtgctcctgtagcatactttttctttaccttgagaatatccatcgtttgcttggtcaatagcgatatgtgattttttatcaaccactcaaaaaagtaattggagtgttcatatcctctacgggctattgtctcatggccgtgtatgaaatttaagtaacacgactgtggtagatttgttctatagagccgattgccgcaaatagatagaactaccaatatgtctgtacaaatgttaaacattaattgattaacagaaaaaacaatgttcgttctgggaatagaaaccagatcaaaacaaaattcgttagaatatatgccacgtttatacatggaatataaaataactacagtttgaaaaataacagtatcatttaaacatttaacttgcggggttaatctcacaactttactgtttttgaactgttcaaaatatagcatcgatccgtgagaaatacgtttagccgcctttaatagaggaaatcccaccgcctttctggatctcaccaacgacgatagttctgaccagcaactcatttcttcatcatccacctgttttaacatataataggcaggagatagatatccgtcattgcaatattccttctcgtaggcacacaatctaatattgataaaatctccattctcttctctgcatttattatcttgtctcggtggctgattaggctgtggtcttggtttaggccttggtctatcgttgttgaatctattttggtcattaaatctttcatttcttcctggtatatttttatcacctcgtttggttggatttttgtctatattatcgtttgtaacatcggtacgggtattcatttatcacaaaaaaaacttctctaaatgagtctactgctagaaaacctcatcgaagaagataccatattttttgcaggaagtatatctgagtatgatgatttacaaatggttattgccggcgcaaaatccaaatttccaagatctatgctttctatttttaatatagtacctagaacgatgtcaaaatatgagttggagttgattcataacgaaaatatcacaggagcaatgtttaccacaatgtataatataagaaacaatttgggtctaggagatgataaactaactattgaagccattgaaaactatttcttggatcctaacaatgaagttatgcctcttattattaataatacggatatgactgccgtcattcctaaaaaaagtggtaggagaaagaataagaacatggttatcttccgtcaaggatcatcacctatcttgtgcattttcgaaactcgtaaaaagattaatatttataaagaaaatatggaatccgcgtcgactgagtatacacctatcggagacaacaaggctttgatatctaaatatgcgggaattaatgtcctgaatgtgtattctccttccacatccataagattgaatgccatttacggattcaccaataaaaataaactagagaaacttagtactaataaggaactagaatcgtatagttctagccctcttcaagaacccattaggttaaatgattttctgggactattggaatgtgttaaaaagaatattcctctaacagatattccgacaaaggattgattactataaatggagaatgttcctaatgtatactttaatcctgtgtttatagagcccacgtttaaacattctttattaagtgtttataaacacagattaatagttttatttgaagtattcgttgtattcattctaatatatgtattttttagatctgaattaaatatgttcttcatgcctaaacgaaaaatacccgatcctattgatagattacgacgtgctaatctagcgtgtgaagacgataaattaatgatctatggattaccatggatgacaactcaaacatctgcgttatcaataaatagtaaaccgatagtgtataaagattgtgcaaagcttttgcgatcaataaatggatcacaaccagtatctcttaacgatgttcttcgcagatgatgattcattttttaagtatttggctagtcaagatgatgaatcttcattatctgatatattgcaaatcactcaatatctagactttctgttattattattgatccaatcaaaaaataaattagaagctgtgggtcattgttatgaatctctttcagaggaatacagacaattgacaaaattcacagactttcaagattttaaaaaactgtttaacaaggtccctattgttacagatggaagggtcaaacttaataaaggatatttgttcgactttgtgattagtttgatgcgattcaaaaaagaatcctctctagctaccaccgcaatagatcctgttagatacatagatcctcgtcgtgatatcgcattttctaacgtgatggatatattaaagtcgaataaagtgaacaataattaattctttattgtcatcatgaacggcggacatattcagttgataatcggccccatgttttcaggtaaaagtacagaattaattagacgagttagacgttatcaaatagctcaatataaatgcgtgactataaaatattctaacgataatagatacggaacgggactatggacgcatgataagaataattttgaagcattggaagcaactaaactatgtgatgtcttggaatcaattacagatttctccgtgataggtatcgatgaaggacagttctttccagacattgtttaattctgtgagcgtatggcaaacggtaccgagctcggtttggaattagtgaaagcttaaaaattgaaattttattttttttttttggaatataaataagctcgaagtcgaccaccatggtgggtgaggatagcgtgctgatcaccgagaacatgcacatgaaactgtacatggagggcaccgtgaacgaccaccacttcaagtgcacatccgagggcgaaggcaagccctacgagggcacccagaccatgaagatcaaggtggtcgagggcggccctctccccttcgccttcgacatcctggctaccagcttcatgtacggcagcaaaacctttatcaaccacacccagggcatccccgacttctttaagcagtccttccctgagggcttcacatgggagaggatcaccacatacgaagacgggggcgtgctgaccgctacccaggacaccagcctccagaacggctgcctcatctacaacgtcaagatcaacggggtgaacttcccatccaacggccctgtgatgcagaagaaaacactcggctgggaggccagcaccgagatgctgtaccccgctgacagcggcctgagaggccatagccagatggccctgaagctcgtgggcgggggctacctgcactgctccctcaagaccacatacagatccaagaaacccgctaagaacctcaagatgcccggcttctacttcgtggacaggagactggaaagaatcaaggaggccgacaaagagacctacgtcgagcagcacgagatggctgtggccaggtactgcgacctgcctagcaaactggggcacagctgattaattaatttttatcgatctaattcaacaatgtctggagagctcggatccttctgtgagcgtatggcaaacgaaggaaaaatagttatagtagccgcactcgatgggacatttcaacgtaaaccgtttaataatattttgaatcttattccattatctgaaatggtggtaaaactaactgctgtgtgtatgaaatgctttaaggaggcttccttttctaaacgattgggtgaggaaaccgagatagagataataggaggtaatgatatgtatcaatcggtgtgtagaaagtgttacgtcggctcataatattatattttttatctaaaaaactaaaaataaacattgattaaattttaatataatacttaaaaatggatgttgtgtcgttagataaaccgtttatgtattttgaggaaattgataatgagttagattacgaaccagaaagtgcaaatgaggtcgcaaaaaaactgccgtatcaaggacagttaaaactattactaggagaattattttttcttagtaagttacagcgacacggtatattagatggtgccaccgtagtgtatataggatcggctcctggtacacatatacgttatttgagagatcatttctataatttaggagtgatcatcaaatggatgctaattgacggccgccatcatgatcctattttaaatggattgcgtgatgtaactctagtgactcggttcgttgatgaggaatatctacgatccatcaaaaaacaactgcatccttctaagattattttaatttctgatgtgagatccaaacgaggaggaaatgaacctagtacggcggatttactaagtaattacgctctacaaaatgtcatgattagtattttaaaccccgtggcgtctagtcttaaatggagatgcccgtttccagatcaatggatcaaggacttttatatcccacacggtaataaaatgttacaaccttttgctccttcatattcagctgaaatgagattattaagtatttataccggtgagaacatgagactgactcgagttaccaaattagacgctgtaaattatgaaaaaaagatgtactaccttaataagatcgtccgtaacaaagtagttgttaactttgattatcctaatcaggaatatgactattttcacatgtactttatgctgaggaccgtgtactgcaataaaacatttcctactactaaagcaaaggtactatttctacaacaatctatatttcgtttcttaaatattccaacaacatcaactgaaaaagttagtcatgaaccaatacaacgtaaaatatctagcaaaaattctatgtctaaaaacagaaatagcaagagatccgtacgcggtaataaatagaaacgtactactgagatatactaccgatatagagtataatgatttagttactttaataaccgttagacataaaattgattctatgaaaactgtgtttcaggtatttaacgaatcatccataaattatactccggttgatgatgattatggagaaccaatcattataacatcgtatcttcaaaaaggtcataacaagtttcctgtaaattttctatacatagatgtggtaatatctgacttatttcctagctttgttagactagatactacagaaactaatatagttaatagtgtactacaaacaggcgatggtaaaaagactcttcgtcttcccaaaatgttagagacggaaatagttgtcaagattctctatcgccctaatataccattaaaaattgttagatttttccgcaataacatggtaactggagtagagatagccgatagatctgttatttcagtcgctgattaatcaattagtagagatgagataagaacattataataatcaataatatatcttatatcttatatcttatatcttatatcttgtttagaaaaatgctaatattaaaatagctaacgctagtaatccaatcggaagccatttgatatctataatagggtatctaatttcctgatttaaatagcggacagctatattctcggtagctactcgtttggaatcacaaacattatttacatctaatttactatctgtaatggaaacgtttcccaatgaaatggtacaatccgatacattgcattttgttatatttttttttaaagaggctggtaacaacgcatcgcttcgtttacatggctcgtaccaacaataatagggtaatcttgtatctattcctatccgtactatgcttttatcaggataaatacatttacatcgtatatcgtctttgttagcatcacagaatgcataaatttgttcgtccgtcatgataaaaatttaaagtgtaaatataactattatttttatagttgtaataaaaagggaaatttaattgtatactttcggttctttaaaagaaactgacttgataaaaatggctgtaatctctaaggttacgtatagtctatatgatcaaaaagagattaatgctacagatattatcattagtcatgttaaaaatgacgacgatatcggtaccgttaaagatggtagactaggtgctatggatggggcattatgtaagacttgtgggaaaacggaattggaatgtttcggtcactggggtaaagtaagtatttataaaactcatatagttaagcctgaatttatttcagaaattattcgtttactgaatcatatatgtattcactgcggattattgcgttcacgagaaccgtattccgacgatattaacctaaaagagttatcgggacacgctcttaggagattaaaggataaaatattatccaagaaaaagtcatgttggaacagtgaatgtatgcaaccgtatcaaaaaattactttttcaaagaaaaaggtttgtttcgtcaacaagttggatgatattaacgttcctaattctctcatctatcaaaagttaatttctattcatgaaaagttttggccattattagaaattcatcaatatccagctaacttattttatacagactactttcccatccctccgttgattattagaccggctattagtttttggatagatagtatacccaaagagaccaatgaattaacttacttattaggtatgatcgttaagaattgtaacttgaatgctgatgaacaggttatccagaaggcggtaatagaatacgatgatattaaaattatttctaataacactaccagtatcaatttatcatatattacatccggcaaaaataatatgattagaagttatatcgtcgcccgacgaaaagatcagaccgctagatctgtaattggtcccagtacatctatcaccgttaatgaggtaggaatgcccgcatatattagaaatacacttacagaaaagatatttgttaatgcctttacagtggataaagttaaacaactattagcgtcaaaccaagttaaattttactttaataaacgattaaaccaattaacaagaatacgccaaggaaagtttattaaaaataaaatacatttattgcctggtgattgggtagaagtagctgttcaagaatatacaagtattatttttggaagacagccgtctctacatagatacaacgtcatcgcttcatctatcagagctaccgaaggagatactatcaaaatatctcccggaattgccaactctcaaaatgctgatttcgacggggatgaggaatggatgatattagaacaaaatcctaaagctgtaattgaacaaagtattcttatgtatccgacgacgttactcaaacacgatattcatggagcccccgtttatggatctattcaagatgaaatcgtagcagcgtattcattgtttaggatacaagatctttgtttagatgaagtattgaacatcttggggaaatatggaagagagttcgatcctaaaggtaaatgtaaattcagcggtaaagatatctatacttacttgataggtgaaaagattaattatccgggtctcttaaaggatggtgaaattattgcaaacgacgtagatagtaattttgttgtggctatgaggcatctgtcattggctggactcttatccgatcataagtcgaacgtggaaggtatcaactttattatcaagtcatcttatgtttttaagagatatctatctatttacggttttggggtgacattcaaagatctgagaccaaattcgacgttcactaataaattggaggccatcaacgtagaaaaaatagaacttatcaaagaagcatacgccaaatatctcaacgatgtaagagacgggaaaatagttccattatctaaagctttagaggcggactatgtggaatccatgttatccaacttgacaaatcttaatatccgagagatagaagaacatatgagacaaacgctgatagatgatccagataataacctcctgaaaatggccaaagcgggttataaagtaaatcccacagaactaatgtatattctaggtacgtatggacaacaaaggattgatggtgaaccagcagagactcgagtattgggtagagttttaccttactatcttccagactctaaggatccagaaggaagaggttatattcttaattctttaacaaaaggattaacgggttctcaatattacttttcgatgctggttgcaagatctcaatctactgatatcgtctgtgaaacatcacgtaccggaacactggctagaaaaatcattaaaaagatggaggatatggtggtcgacggatacggacaagtagttataggtaatacgctcatcaagtacgccgccaattataccaaaattctaggctcagtatgtaaacctgtagatcttatctatccagatgagtccatgacttggtatttggaaattagtgctctgtggaataaaataaaacagggattcgtttactctcagaaacagaaacttgcaaagaagacattggcgccgtttaatttcctagtattcgtcaaacccaccactgaggataatgctattaaggttaaggatctgtacgatatgattcataacgtcattgatgatgtgagagagaaatacttctttacggtatctaatatagattttatggagtatatattcttgacgcatcttaatccttctagaattagaattacaaaagaaacggctatcactatctttgaaaagttctatgaaaaactcaattatactctaggtggtggaactcctattggaattatttctgcacaggtattgtctgagaagtttacacaacaagccctgtccagttttcacactactgaaaaaagtggtgccgtcaaacaaaaacttggtttcaacgagtttaataacttgactaatttgagtaagaataagaccgaaattatcactctggtatccgatgatatctctaaacttcaatctgttaagattaatttcgaatttgtatgtttgggagaattaaatccagacatcactcttcgaaaagaaacagataggtatgtagtagatataatagtcaatagattatacatcaagagagcagaaataaccgaattagtcgtcgaatatatgattgaacgatttatctcctttagcgtcattgtaaaggaatggggtatggaaacattcattgaggatgaggataatattagatttactgtctacctaaatttcgttgaaccggaagaattgaatcttagtaagtttatgatggttcttccgggtgccgccaacaagggaaagattagtaaattcaagattcctatctctgactatacgggttatgacgacttcaatcaaacaaaaaagctcaataagatgactgtagaactcatgaatctaaaagaattgggttctttcgatttggaaaacgtcaacgtgtatcctggagtatggaatacatacgatatcttcggtatcgaggccgctcgtgaatacttgtgcgaagccatgttaaacacctatggagaagggttcgattatctgtatcagccttgtgatcttctcgctagtttactatgtgctagttacgaaccagaatcagtgaataaattcaagttcggcgcagctagtactcttaagagagctacgttcggagacaataaagcattgttaaacgcggctcttcataaaaagtcagaacctattaacgataatagtagctgccacttttttagcaaggtccctaatataggaactggatattacaaatactttatcgacttgggtcttctcatgagaatggaaaggaaactatctgataagatatcttctcaaaagatcaaggaaatggaagaaacagaagacttttaattcttatcaataacatatttttctatgatctgtcttttaaacgatggattttccacaaatgcgcctctcaagtccctcatagaatgatacacgtataaaaaatatagcataggcaatgactccttatttttagacattagatatgccaaaatcatagccccgcttctatttactcccgcagcacaatgaaccaacacgggctcgtttcgttgatcacatttagataaaaaggcggttacgtcgtcaaaatatttactaatatcggtagttgtatcatctaccaacggtatatgaataatattaatattagagttaggtaatgtatatttatccatcgtcaaatttaaaacatatttgaacttaacttcagatgatggtgcatccatagcatttttataatttcccaaatacacattattggttacccttgtcattatagtgggagatttggctttgtgcatatctccagttgaacgtagtagtaagtatttatacaaacttttcttatccatttataacgtacaaatggataaaactactttatcggtaaacgcgtgtaatttagaatacgttagagaaaaggctatagtaggcgtacaagcagccaaaacatcaacacttatattctttgttattatattggcaattagtgcgctattactctggtttcagacgtctgataatccagtctttaatgaattaacgagatatatgcgaattaaaaatacggttaacgattggaaatcattaacggatagcaaaacaaaattagaaagtgatagaggtagacttctagccgctggtaaggatgatatattcgacttcaaatgtgtggatttcggcgcctattttatagctatgcgattggataagaaaacatatctgccgcaagctattaggcgaggtactggagacgcgtggatggttaaaaaggcggcaaaggtcgatccatctgctcaacaattttgtcagtatttgataaaacacaagtctaataatgttattacttgtggtaatgagatgttaaatgaattaggttatagcggttattttatgtcaccgcattggtgttccgattttagtaatatggaatagtgttagataaatgcggtaacgaatgttcctgtaaggaaccataacagcttagatttaacgttaaagatgagcataaacataataaacaaaattacaatcaaacttataacattaatatcaaacaatccaaaaaatgaaatcagtggagtagtaaacgcgtacataactcctggataacgtttagcagctgccgttcctattctagaccaaaaatttggtttcatgttttcgaaacggtattctgcaacaagtcggggatcgtgttctacatatttggcggcattatccagtatctgcctattgatcttcatttcgttttcgattctggctatttcaaaataaaatcccgatgatagacctccagactttataatttcatctacgatgttcagcgccgtagtaactctaataatataggctgataagctaacatcataccctcctgtatatgtgaatatggcatgatttttgtccattacaagctcggttttaactttattgcctgtaataatttctctcatctgtaggatatctatttttttgtcatgcattgccttcaagacgggacgaagaaacgtaatatcctcaataacgttatcgttttctacaataactacatattctacctttttattttctaactcggtaaaaaaattagaatcccatagggctaaatgtctagcgatatttcttttcgtttcctctgtacacatagtgttacaaaaccctgaaaagaagtgagtatacttgtcatcatttctaatgtttcctccagtccactgtataaacgcataatccttgtaatgatctggatcatccttgactaccacaacatttcttttttctggcataacttcgttgtcctttacatcatcgaacttctgatcattaatatgctcatgaacattaggaaatgtttctgatggaggtctatcaataactggcacaacaataacaggagttttcaccgccgccatttagttattgaaattaatcatatacaactctttaatacgagttatattttcgtctatccattgtttcacatttacatatttcgacaaaaagatataaaatgcgtattccaatgcttctctgtttaatgaattactaaaatatacaaacacgtcactgtctggcaataaatgatatcttagaatattgtaacaatttattttgtattgcacatgttcgtgatctatgagttcttcttcgaatggcataggatctccgaatctgaaaacgtataaataggagttagaataataatatttgagagtattggtaatatataaactctttagcggtataattagtttttttctctcaatttctatttttagatgtgatggaaaaatgactaattttgtagcattagtatcatgaactctaatcaaaatcttaatatcttcgtcacacgttagctctttgaagtttttaagagatgcatcagttggttctacagatggagtaggtgcaacaattttttgttctacacatgtatgtactggagccattgttttaactataatggtgcttgtatcgaaaaactttaatgcagatagcggaagctcttcgccgcgactttctacgtcgtaattgggttctaacgccgatctctgaatggatactagttttctaagttctaatgtgattctctgaaaatgtaaatccaattcctccggcattatagatgtgtatacatcggtaaataaaactatagtatccaacgatcccttctcgcaaattctagtcttaaccaaaaaatcgtatataaccacggagatggcgtatttaagagtggattcttctaccgttttgttcttggatgtcatataggaaactataaagtccgcactactgttaagaatgattactaacgcaactatatagttcaaattaagcattttggaaacataaaataactctgtagacgatacttgactttcgaataagtttgcagacaaacgaagaaagaacagacctctcttaatttcagaagaaaactttttttcgtattcctgacgtctagagtttatatcaataagaaagttaagaattagtcggttaatgttgtatttcattacccaagtttgagatttcataatattatcaaaagacatgataatattaaagataaagcgctgactatgaacgaaatagctatatggttcgctcaagaatatagtcttgttaaacgtggaaacgataactgtatttttaatcacgtcagcggcatctaaattaaatataggtatatttattccacacactctacaatatgccacaccatcttcataataaataaattcgttagcaaaattattaattttagtgaaatagttagcgtcaactttcatagcttccttcaatctaatttgatgctcacacggtgcgaattccactctaacatcccttttccatgcctcaggttcatcgatctctataatatctagttttttgcgtttcacaaacacaggctcgtctctcgcgatgagatctgtatagtaactatgtaaatgataactagatagaaagatgtagctatatagatgacgatcctttaagagaggtataataactttaccccaatcagatagactgttgttatggtcttcggaaaaagaatttttataaatttttccagtattttccaaatatacgtacttaacatctaaaaaatccttaatgataataggaatggataatccgtctattttataaagaaatacatatcgcacattatacttttttttggaaatgggaataccgatgtgtctacataaatatgcaaagtctaaatattttttagagaatcttagttggtccaaattcttttccaagtacggtaatagatttttcatattgaacggtatcttcttaatctctggttctagttccgcattaaatgatgaaactaagtcactatttttataactaacgattacatcacctctaacatcatcatttaccagaatactgatcttcttttgtcgtaaatacatgtctaatgtgttaaaaaaaagatcatacaagttatacgtcatttcatctgtggtattcttgtcattgaaggataaactcgtactaatctcttctttaacagcctgttcaaatttatatcctatatacgaaaaaatagcaaccagtgtttgatcatccgcgtcaatattctgttctatcgtagtgtataacaatcgtatatcttcttctgtgatagtcgatacgttataaaggttgataacgaaaatatttttatttcgtgaaataaagtcatcgtaggattttggacttatattcgcgtctagtagatatgcttttatttttggaatgatctcaattagaatagtctctttagagtccatttaaagttacaaacaactaggaaattggtttatgatgtataatttttttagtttttatagattctttattctatacttaaaaaatgaaaataaatacaaaggttcttgagggttgtgttaaattgaaagcgagaaataatcataaattatttcattatcgcgatatccgttaagtttgtatcgtaatggcgtggtcaattacgaataaagcggatactagtagcttcacaaagatggctgaaatcagagctcatctaaaaaatagcgctgaaaataaagataaaaacgaggatattttcccggaagatgtaataattccatctactaagcccaaaaccaaacgagccactactcctcgtaaaccagcggctactaaaagatcaaccaaaaaggaggaagtggaagaagaagtagttatagaggaatatcatcaaacaactgaaaaaaattctccatctcctggagtcagcgacattgtagaaagcgtggccgctgtagagctcgatgatagcgacggggatgatgaacctatggtacaagttgaagctggtaaagtaaatcatagtgctagaagcgatctctctgacctaaaggtggctaccgacaatatcgttaaagatcttaagaaaattattactagaatctctgcagtatcgacggttctagaggatgttcaagcagctggtatctctagacaatttacttctatgactaaagctattacaacactatctgatctagtcaccgagggaaaatctaaagttgttcgtaaaaaagttaaaacttgtaagaagtaaatgcgtgcacttttttataaagatggtaaactctttaccgataataattttttaaatcctgtatcagacgataatccagcgtatgaggttttgcaacatgttaaaattcctactcatttaacagatgtagtagtatatgaacaaacgtgggaggaggcgttaactagattaatttttgtgggaagcgattcaaaaggacgtagacaatacttttacggaaaaatgcatgtacagaatcgcaacgctaaaagagatcgtatttttgttagagtatataacgttatgaaacgaattaattgttttataaacaaaaatataaagaaatcgtccacagattccaattatcagttggcggtttttatgttaatggaaactatgttttttattagatttggtaaaatgaaatatcttaaggagaatgaaacagtagggttattaacactaaaaaataaacacatagaaataagtcccgatgaaatagttatcaagtttgtaggaaaggacaaagtttcacatgaatttgttgttcataagtctaatagactatataaaccgctattgaaactgacggatgattctagtcccgaagaatttctgttcaacaaactaagtgaacgaaaggtatatgaatgtatcaaacagtttggtattagaatcaaggatctccgaacgtatggagtcaattatacgtttttatataatttttggacaaatgtaaagtccatatctcctcttccatcaccaaaaaagttaatagcattaactatcaaacaaactgctgaagtggtaggtcatactccatcaatttcaaaaagagcttatatggcaacgactattttagaaatggtaaaggataaaaattttttagatgtagtatctaaaactacgttcgatgaattcctatctatagtcgtagatcacgttaaatcatctacggatggatgatatagatctttacacaaataattacaagaccgataaatggaaatggataagcgtatgaaatctctcgcaatgacagctttcttcggagagctaagcacattagatattatggcattgataatgtctatatttaaacgccatccaaacaataccattttttcagtggataaggatggtcagtttatgattgatttcgaatacgataattataaggcttctcaatatttggatctgaccctcactccgatatctggagatgaatgcaagactcacgcatcgagtatagccgaacaattggcgtgtgtggatattattaaagaggatattagcgaatatatcaaaactactccccgtcttaaacgatttataaaaaaataccgcaatagatcagatactcgcatcagtcgagatacagaaaagcttaaaatagctctagctaaaggcatagattacgaatatataaaagacgcttgttaataagtaaatgaaaaaaaactagtcgtttataataaaacacgatatggatgccaacgtagtatcatcttctactattgcgacgtatatagacgctttagcgaagaatgcttcagaattagaacagaggtctaccgcatacgaaataaataatgaattggaactagtatttattaagccgccattgattactttgacaaatgtagtgaatatctctacgattcaggaatcgtttattcgatttaccgttactaataaggaaggtgttaaaattagaactaagattccattatctaaggtacatggtctagatgtaaaaaatgtacagttagtagatgctatagataacatagtttgggaaaagaaatcattagtgacggaaaatcgtcttcacaaagaatgcttgttgagactatcgacagaggaacgtcatatatttttggattacaagaaatatggatcctctatccgactagaattagtcaatcttattcaagcaaaaacaaaaaactttacgatagactttaagctaaaatattttctaggatccggtgcccaatctaaaagttctttgttgcacgctattaatcatccaaagtcaaggcctaatacatctctggaaatagaattcacacctagagacaatgaaacagttccatatgatgaactaataaaggaattgacgactctctcgcgtcatatatttatggcttctccagagaatgtaattctttctccgcctattaacgcgcctataaaaacctttatgttgcctaaacaagatatagtaggtttggatctggaaaatctatatgccgtaactaagactgacggcattcctataactatcagagttacatcaaacgggttgtattgttattttacacatcttggttatattattagatatcctgttaagagaataatagattccgaagtagtagtctttggtgaggcagttaaggataagaactggaccgtatatctcattaagctaatagagcctgtgaatgcaatcaatgatagactagaagaaagtaagtatgttgaatctaaactagtggatatttgtgatcggatagtattcaagtcaaagaaatacgaaggtccgtttactacaactagtgaagtcgtcgatatgttatctacatatttaccaaagcaaccagaaggtgttattctgttctattcaaagggacctaaatctaacattgattttaaaattaaaaaggaaaatactatagaccaaactgcaaatgtagtatttaggtacatgtccagtgaaccaattatctttggagaatcgtctatctttgtagagtataagaaatttagcaacgataaaggctttcctaaagaatatggttctggtaagattgtgttatataacggcgttaattatctaaataatatctattgtttggaatatattaatacacataatgaagtgggtattaagtccgtggttgtacctattaagtttatagcagaattcttagttaatggagaaatacttaaacctagaattgataaaaccatgaaatatattaactcagaagattattatggaaatcaacataatatcatagtcgaacatttaagagatcaaagcatcaaaataggagatatctttaacgaggataaactatcggatgtgggacatcaatacgccaataatgataaatttagattaaatccagaagttagttattttacgaataaacgaactagaggaccgttgggaattttatcaaactacgtcaagactcttcttatttctatgtattgttccaaaacatttttagacgattccaacaaacgaaaggtattggcgattgattttggaaacggtgctgacctggaaaaatacttttatggagagattgcgttattggtagcgacggatccggatgctgatgctatagctagaggaaatgaaagatacaacaaattaaactctggaattaaaaccaagtactacaaatttgactacattcaggaaactattcgatccgatacatttgtctctagtgtcagagaagtattctattttggaaagtttaatatcatcgactggcagtttgctatccattattcttttcatccgagacattatgctaccgtcatgaataacttatccgaactaactgcttctggaggcaaggtattaatcactaccatggacggagacaaattatcaaaattaacagataaaaagacttttataattcataagaatttacctagtagcgaaaactatatgtctgtagaaaaaatagctgatgatagaatagtggtatataatccatcaacaatgtctactccaatgactgaatacattatcaaaaagaacgatatagtcagagtgtttaacgaatacggatttgttcttgtagataacgttgatttcgctacaattatagaacgaagtaaaaagtttattaatggcgcatctacaatggaagatagaccgtctacaaaaaactttttcgaactaaatagaggagccattaaatgtgaaggtttagatgtcgaagacttacttagttactatgttgtttatgtcttttctaagcggtaaataataatatggtatgggttctgatatccccgttctaaatgcattaaataattccaatagagcgatttttgttcctataggaccttccaactgtggatactctgtattgttaatagatatattaatacttttgtcgggtaacagaggttctacgtcttctaaaaataaaagttttataacatctggcctgttcataaataaaaacttggcgattctatatatactcttattatcaaatctagccattgtcttatagatgtgagctactgtaggtgtaccatttgattttctttctaatactatatatttctctcgaagaagttcttgcacatcatctgggaataaaatactactgttgagtaaatcagttattttttttatatcgatattgatggacatttttatagttaaggataataagtatcccaaagtcgataacgacgataacgaagtatttatacttttaggaaatcacaatgactttatcagattaaaattaacaaaattaaaggagcatgtatttttttctgaatatattgtgactccagatacatatggatctttatgcgtcgaattaaatgggtctagttttcagcacggtggtagatatatagaggtggaggaatttatagatgctggaagacaagttagatggtgttctacatccaatcatatatctaaagatatacccgaagatatgcacactgataaatttgtcatttatgatatatacacttttgacgctttcaagaataaacgattggtattcgtacaggtacctccgtcgttaggagatgatagtcatttgactaatccgttattgtctccgtattatcgtaattcagtagccagacaaatggtcaataatatgatttttaatcaagattcatttttaaaatatttattagaacatctgattagaagccactatagagtttctaaacatataacaatagttagatacaaggataccgaagaattaaatctaacgagaatatgttataatagagataagtttaaggcgtttgtattcgcttggtttaacggcgtttcggaaaatgaaaaggtactagatacgtataaaaaggtatctaatttgatataatgaattcagtgactgtatcacacgcgccatatactattacttatcacgatgattgggaaccagtaatgagtcaattggtagagttttataacgaagtagccagttggctgctacgagacgagacgtcgcctattcctgataagttctttatacagttgaaacaaccgcttagaaataaacgagtatgtgtgtgcggtatagatccgtatccgaaagatggaactggtgtaccgttcgaatcaccaaattttacaaaaaaatcaattaaggagatagcttcatctatatctagattaaccggagtaattgattataaaggttataaccttaatataatagacggggttataccctggaattattacttaagttgtaaattaggagaaacaaaaagtcacgcgatctactgggataagatttccaagttactgctgcagcatataactaaacacgttagtgttctttattgtttgggtaaaacagatttctcgaatatacgggcaaagttagaatccccggtaactaccatagtcggatatcatccagcggctagagaccgccaattcgagaaagatagatcatttgaaattatcaacgttttactggaattagacaacaaggcacctataaattgggctcaagggtttatttattaatgctttagtgaaattttaacttgtgttctaaatggatgcggctattagaggtaatgatgttatctttgttcttaagactataggtgtcccgtcagcgtgcagacaaaatgaagatccaagatttgtagaagcatttaaatgcgacgagttagaaagatatattgagaataatccagaatgtacactattcgaaagtcttagggatgaggaagcatactctatagtcagaattttcatggatgtagatttagacgcgtgtctagacgaaatagattatttaacggctattcaagattttattatcgaggtgtcaaactgtgtagctagattcgcgtttacagaatgcggtgccattcatgaaaatgtaataaaatccatgagatctaatttttcattgactaagtctacaaatagagataaaacaagttttcatattatctttttagacacgtataccactatggatacattgatagctatgaaacgaacactattagaattaagtagatcatctgaaaatccactaaccagatcgatagacactgccgtatataggagaaaaacaactcttcgggttgtaggtactaggaaaaatccaaattgcgacactattcatgtaatgcaaccaccgcatgataatatagaagattacctattcacttacgtggatatgaacaacaatagttattacttttctctacaacaacgattggaggatttagttcctgataagttatgggaaccagggtttatttcattcgaagacgctataaaaagagtttcaaaaatattcattaattctataataaactttaatgatctcgatgaaaataattttacaacggtaccactggtcatagattacgtaacaccttgtgcattatgtaaaaaacgatcgcataaacatccgcatcaactatcgttggaaaatggtgctattagaatttacaaaactggtaatccacatagttgtaaagttaaaattgttccgttggatggtaataaactgtttaatattgcacaaagaattttagacactaactctgttttattaaccgaacgaggagaccatatagtttggattaataattcatggaaatttaacagcgaagaacccttgataacaaaactaattttgtcaataagacatcaactacctaaggaatattcaagcgaattactctgtccgaggaaacgaaagactgtagaagctaacatacgagacatgttagtagattcagtggagaccgatacctatccggataaacttccgtttaaaaatggtgtattggacctggtagacggaatgttttactctggagatgatgctaaaaaatatacgtgtactgtatcaaccggatttaaatttgacgatacaaagttcgtcgaagacagtccagaaatggaagagttaatgaatatcattaacgatatccaaccattaacggatgaaaataagaaaaatagagagctatatgaaaaaacattatctagttgtttatgcggtgctaccaaaggatgtttaacattcttttttggagaaactgcaactggaaagtcgacaaccaaacgtttgttaaagtctgctatcggtgacctgtttgttgagacgggtcaaacaattttaacagatgtattggataaaggacctaatccatttatcgctaacatgcatttgaaaagatctgtattctgtagcgaactacctgattttgcatgtagtgggtcaaagaaaatcagatctgataatattaaaaagttgacagaaccttgtgtcattggaagaccgtgtttctccaataaaattaataatagaaaccatgcgacaatcattatcgatactaattacaaacctgtttttgataggatagataacgcattaatgagaagaattgccgtcgtgcgattcagaacacacttttctcaaccttctggtagagaggctgctgaaaataatgacgcgtacgataaagtcaaactattagacgaggggttagatggtaaaatacaaaataatagatatagattcgcatttctatacttgttggtgaaatggtacagaaaatatcatgttcctattatgaaactatatcctacacccgaagagattcctgactttgcattctatctcaaaataggtactctgttagtatctagctctgtaaagcatattccattaatgacggacctctccaaaaagggatatatattgtacgataatgtggttactcttccgttgactactttccaacagaaaatatccaagtattttaattctagactatttggacacgatatagagagcttcatcaatagacataagaaatttgccaatgttagtgatgaatatctgcaatatatattcatagaggatatttcatctccgtaaatatatgctcatatatttatagaagatatcacatatctaaatgaataccggaatcatagatttatttgataatcatgttgatagtataccaactatattacctcatcagttagctactctagattatctagttagaactatcatagatgagaacagaagcgtgttattgttccatattatgggatcaggtaaaacaataatcgctttgttgttcgccttggtagcttccagatttaaaaaggtttacattctagtgccgaacatcaacatcttaaaaattttcaattataatatgggtgtagctatgaacttgtttaatgacgaattcatagctgagaatatctttattcattccacaacaagtttttattctcttaattataacgataacgtcattaattataacggattatctcgctacaataactctatttttatcgttgatgaggcacataatatctttgggaataatactggagaacttatgaccgtgataaaaaataaaaacaagattccttttttactattgtctggatctcccattactaacacacctaatactctgggtcatattatagatttaatgtccgaagagacgatagattttggtgaaattattagtcgtggtaagaaagtaattcagacacttcttaacgaacgcggtgtgaatgtacttaaggatttgcttaaaggaagaatatcatattacgaaatgcctgataaagatctaccaacgataagatatcacggacgtaagtttctagatactagagtagtatattgtcacatgtctaaacttcaagagagagattatatgattactagacgacagctatgttatcatgaaatgtttgataaaaatatgtataacgtgtcaatggcagtattgggacaacttaatctgatgaataatttagatactttatttcaggaacaggataaggaattgtacccaaatctgaaaataaataatggcgtgttatacggagaagaattggtaacgttaaacattagttccaaatttaaatactttattaatcggatacagacactcaacggaaaacattttatatacttttctaattctacatatggcggattggtaattaaatatatcatgctcagtaatggatattctgaatataatggttctcagggaactaatccacatatgataaacggcaaaccaaaaacatttgctatcgttactagtaaaatgaaatcgtctttagaggatctattagatgtgtataattctcctgaaaacgatgatggtagtcaattgatgtttttgttttcatcaaacattatgtccgaatcctatactctaaaagaggtaaggcatatttggtttatgactatcccagatactttttctcaatacaaccaaattcttggacgatctattagaaaattctcttacgccgatatttctgaaccagttaatgtatatcttttagccgccgtatattccgatttcaatgacgaagtgacgtcattaaacgattacacacaggatgaattaattaatgttttaccatttgacatcaaaaagctgttgtatctaaaatttaagacgaaagaaacgaatagaatatactctattcttcaagagatgtctgaaacgtattctcttccaccacatccatcaattgtaaaagttttattgggagaattggtcagacaatttttttataataattctcgtattaagtataacgataccaagttacttaaaatggttacatcagttataaaaaataaagaagacgctaggaattacatagatgatattgtaaacggtcacttctttgtatcgaataaagtatttgataaatctcttttatacaaatacgaaaacgatattattacagtaccgtttagactttcctacgaaccatttgtttggggagttaactttcgtaaagaatataacgtggtatcttctccataaaactgatgagatatataaagaaataaatgtcgagctttgttaccaatggatacctttccgttacattggaaccacacgagctgacgttagacataaaaactaatattaggaatgccgtatataagacgtatctccatagagaaattagtggtaaaatggccaagaaaatagaaattcgtgaagacgtggaattacctctcggcgaaatagttaataattctgtagttataaacgttccgtgtgtaataacctacgcgtattatcacgttggggatatagtcagaggaacattaaacatcgaagatgaatcaaatgtaactattcaatgtggagatttaatctgtaaactaagtagagattcgggtactgtatcatttagcgattcaaagtactgcttttttcgaaatggtaatgcgtatgacaatggcagcgaagtcactgccgttctaatggaggctcaacaaggtatcgaatctagttttgtttttctcgcgaatatcgtcgactcataaaaaagagaatagcggtaagtataaacacgaatactatggcaataattgcgaatgttttattctcttcgatatatttttgataatatgaaaaacatgtctctctcaaatcggacaaccatctcataaaatagttctcgcgcgctggagaggtagttgccgctcgtataatctctccagaataatatacttgcgtgtcgtcgttcaatttatacggatttctatagttctctgttatataatgcggtttgccctcatgattagacgacgacaatagtgttctaaatttagatagttgatcagaatgaatgtttattggcgttggaaaaattatccatacagcgtctgcagagtggttgatagttgttcctagatatgtaaaataatccaacttactaggcagcaaattgtctagataaaatactgaatcaaacggtgcagacgtattggcggatctaatggaatccaattgattaactatcttttgaaaatatacatttttatgatccaatacttgtaagaatatagaaataatgataagtccatcatcgtgtttttttgcctcttcataagaactatattttttcttattccaatgaacaagattaatctctccagagtatttgtacacatctatcaagtgattggatccataatcgtcttcctttccccaatatatatgtagtgatgataacacatattcattggggagaaaccctccacttatatatcctcctttaaaattaatccttactagttttccagtgttctggatagtggttggtttcgactcattataatgtatgtctaacggcttcaatcgcgcgttagaaattgcttttttagtttctatattaataggagatagttgttgcggcatagtaaaaatgaaatgataactgtttaaaaatagctcttagtatgggaattacaatggatgaggaagtgatatttgaaactcctagagaattaatatctattaaacgaataaaagatattccaagatcaaaagacacgcatgtgtttgctgcgtgtataacaagtgacggatatccgttaataggagctagaagaacttcattcgcgttccaggcgatattatctcaacaaaattcagattctatctttagagtatccactaaactattacggtttatgtactacaatgaactaagagaaatctttagacggttgagaaaaggttctatcaacaatatcgatcctcactttgaagagttaatattattgggtggtaaactagataaaaaggaatctattaaagattgtttaagaagagaattaaaagaggaaagtgatgaacgtataacagtaaaagaatttggaaatgtaattctaaaacttacaacacgggataaattatttaataaagtatatataagttattgcatggcgtgttttattaatcaatcgttggaggatttatcgcatactagtatttacaatgtagaaattagaaagattaaatcattaaatgattgtattaacgacgataaatacgaatatctgtcttatatttataatatgctagttaatagtaaatgaacttttacagatctagtataattagtcagattattaagtataatagacgactagctaagtctattatttgcgaggatgactctcaaattattacactcacggcattcgttaaccaatgcctatggtgtcataaacgagtatccgtgtccgctattttattaactactgataacaaaatattagtatgtaacagacgagatagttttctctattctgaaataattagaactagaaacatgtttagaaagaaacgattatttctgaattattccaattatttgaacaaacaggaaagaagtatactatcgtcatttttttctctagatccagctactactgataatgatagaatagatgctatttatccgggtggcatacccaaaaggggtgagaatgttccagagtgtttatccagggaaattaaagaagaagttaatatagacaattcttttgtattcatagacactcggttttttattcatggcatcatagaagataccattattaataaattttttgaggtaatcttctttgtcggaagaatatctctaacgagtgatcaaatcattgatacatttaaaagtaatcatgaaatcaaggatctaatatttttagatccgaattcaggtaatggactccaatacgaaattgcaaaatatgctctagatactgcaaaacttaaatgttacggccatagaggatgttattatgaatcattaaaaaaattaactgaggatgattgattagaaaatataaattaatttaccatcgtgtatttttataacgggattgtccggcatatcatgtagatagttaccgtctacatcgtatactcgaccatctacgcctttaaatcctctatttattgacattaatctattagaattggaataccaaatattagtaccctcaattagtttattggtaatattttttttagacgatagatcgatggctcttgaaaccaaggttttccaaccggactcattgtcgatcggtgagaagtctttttcattagcatgaatccattctaatgatgtatgtttaaacactctaaacaattggacaaattcttttgatttgctttgaatgatttcaaataggtcttcgtctacagtaggcataccattagataatctagccattataaagtgcacgtttacatatctacgttctggaggagtaagaacgtgactattgagacgaatggctcttcctactatctgacgaagagacgcctcgttccatgtcatatctaaaatgaagatatcattaattgagaaaaaactaataccctcgcctccactagaagagaatacgcatgttttaatgcattctccgttagtgtttgattcttggttaaactcagccaccgccttgattctagtatcttttgttctagatgagaactctatattagagataccaaagactttgaaatatagtaataagatttctattcctgactgattaacaaatggttcaaagactagacatttaccatgggatgctaatattcccaaacatacatctataaatttgacgcttttctcttttaattcagtaaatagagagatatcagccgcactagcatcccctttcaatagttctccctttttaaaggtatctaatgcggatttagaaaactctctatctcttaatgaatttttaaaatcattatatagtgttgctatctcttgcgcgtattcgcccggatcacgattttgtctttcaggaaagctatcgaacgtaaacgtagtagccatacgtctcagaattctaaatgatgatatacctgtttttatttcagcgagtttagccttttgataaatttcttcttgctttttcgacatattaacgtatcgcattaatactgttttcttagcgaatgatgcagacccttctacgtcatcaaaaatagaaaactcgttattaactatatacgaacatagtcctcctagtttggagactaattctttttcatcgactagacgtttattctcaaatagtgattggtgttgtaaggatcctggtcgtagtaagttaaccaacatggtgaattcttgcacactattgacgataggtgtagccgataaacaaatcatcttatggttttttaacgcaatggtcttagataaaaaattatatactgaacgagtaggacggatcttaccatcttctttgattaatgatttagaaatgaagttatgacattcatcaatgatgacgcatattctactcttggaattaatagttttgatattagtaaaaaatttatttctaaaattttgatcatcgtaattaataaaaatacaatccttcgttatctctggagcgtatctgagtatagtgttcatccaaggatcttctatcaaagcctttttcaccaataagataatagcccaattcgtataaatatccttaagatgtttgagaatatatacagtagtcattgttttaccgacacccgtttcatggaacaataaaagagaatgcatactgtctaatcctaagaaaactcttgctacaaaatgttgataatccttgaggcgtactacgtccgaccccatcatttcaacgggcatattagtagttctgcgtaaggcataatcgatataggccgcgtgtgatttactcatttatgagtgataagtaataactatgttttaaaaatcacagcagtagtttaactagtcttctctgatgtttgttttcgatactttttgaatcagaagtcatactagaataaagcaacgagtgaacgtaatagagagcttcgtatactctattcgaaaactctaagaacttattaatgaattccgtatccactggattgtttaaaatactaaattgaacactgttcacatccttccaagaagaagacttagtgacggacttaacatgagacataaataaatccaaattttttttacaaacatcactagccaccataatggcgctatctttcaaccagctatcgcttacgcattttagcagtctaacatttttaaagagactacaatatattctcatagtatcgattacacctctaccgaataaagttggaagtttaataatacaatatttttcgtttacaaaatcaaataatggtcgaaacacgtcgaaggttaacatcttataatcgctaatgtatagattgttttcagtgagatgattattagatttaatagcatctcgttcacgtttgaacagtttattgcgtgcgctgaggtcggcaactacggcgtccgctttagtactcctcccataatactttacgctattaatctttaaaatttcatagactttatctagatcgctttctggtaacatgatatcatgtgtaaaaagttttaacatgtcggtcggcattctatttagatcattaactctagaaatctgaagaaagtaattagctccgtattccagactaggtaatgggcttttacctagagacagattaagttctggcaatgtttcataaaatggaagaaggacatgcgttccctcccggatattttttacaatttcatccatttacaactctatagtttgttttcattattattagttattatctcccataatcttggtaatacttaccccttgatcgtaagataccttatacaggtcattacatacaactaccaattgtttttgtacataatagattggatggttgacatccatggtggaataaactactcgaacagatagtttatctttccccctagatacattagccgtaatagttgtcggcctaaagaatatctttggtgtaaagttaaaagttagggttcttgttccattattgctttttgtcagtagttcattataaattctcgagatgggtccgttctctgaatatagaacatcatttccaaatctaacttctagtctagaaataatatcggtcttattcttaaaatctattcccttgatgaagggatcgttaatgaacaaatccttggcctttgattcggctgatctattatctccgttatagacgttacgttgactagtccaaagacttacaggaatagatgtatcgatgatgttgatactatgtgatatgtgagcaaagattgttctcttagtggcatcactatatgttccagtaatggcggaaaactttttagaaatgttatatataaaagaattttttcgtgttccaaacattagcagattagtatgaagataaacactcatattatcaggaacattatcaatttttacatacacatcagcatcttgaatagaaacgataccatcttctggaacctctacgatctcggcagactccggataaccagtcggtgggccatcgctaacaataactagatcatccaacaatctactcacatatgcatctatataatctttttcatcttgtgagtaccctggatacgaaataaatttattatccgtatttccataataaggtttagtataaacagagagagatgttgccgcatgaacttcagttacagtcgccgttggttggtttatttgacctattactctcctaggtttctctataaacgatggtttaatttgtacattcttaaccatatatccaataaagctcaattcaggaacataaacaaattctttgttgaacgtttcaaagtcgaacgaagagtcacgaataacgatatcggatactggattgaaggttaccgttacggtaatttttgaatcggatagtttaagactgctgaatgtatcttccacatcaaacggagttttaatataaacgtatactgtagatggttctttaatagtgtcattaggagttaggccaatagaaatatcattaagttcactagaatatccagagtgtttcaaagcaattgtattattgatacaattattatataattcttcgccctcaatttcccaaataacaccgttacacgaagagatagatacgtgattaatacatttatatccaacatatggtacgtaactgaatcttcccatacctttaacttctggaagttccaaactcagaaccaaatgattaagcgcagtaatatactgatccctaatttcgaagctagcgatagcctgattgtctggaccatcgtttgtcataactccggatagagaaatatattgcggcatatataaagttggaatttgactatcgactgcgaagacattagaccgtttaatagagtcatccccaccgatcaaagaattaatgatagtattattcattttctatttaaaatggaaaaagcttacaataaactccgtagagaaatatctataatttgtgagttttccttaaagtaacagcttccgtaaacgccgtctttatctcttagtaggtttattgtatttatgaccttttccttatcttcatagaatactaaaggcaacaaagaaatttttggttcttctctaagagctacgtgagacttaaccatagaagccaacgaatccctacatattttagaacagaaataccctacttcaccacccttgtatgtctcaatactaataggtctaaaaaccaaatcttgattacaaaaccaacacttatcaattacactatttgtcttaatagacacatctgccatagatttataatactttggtagtatacaagcgagtgcttcttctttagcgggcttaaagactgctttaggtgctgaaataaccacatctggaaggcttactcgcttagccatttaattacggaactatttttttatacttctaatgagcaagtagaaaacctctcatctacaaaaacgtactcgtgtccataatcctctaccatagttacacgttttttagatctcatatgtgctaaaaagttttcccatactaattggttactattatttttcgtataatttttaacagtttgaggttttagatttttagttacagaagtgatatcgaatattttatccaaaaagaatgaataattaattgtcttagaaggagtgttttcttggcaaaagaataccaagtgcttaaatatttctactacttcattaatcttttctgtactcagattcagtttctcatcttttacttgattgattatttcaaagactaacttataatcctttttatttattctctcgttagccttaagaaaactagatacaaaatttgcatctacatcatccgtggatatttgatttttttccatgatatccaagagttccgagataatttctccagaacattgatgagacaataatctccgcaatacatttctcaaatgaataagtttattagacacgtggaagtttgactttttttgtacctttgtacatttttgaaataccgactcgcaaaaaatacaatattcatatccttgttcagatactataccgttatgtctacaaccgctacataatcgtagattcatgttaacactctacgtatctcgtcgtccaatattttatataaaaacattttatttctagacgttgccagaaaatcctgtaatatttttagttttttgggctgtgaataaagtatcgccctaatattgttaccgtcttccgccaatatagtagttaaattatccgcacatgcagaagaacaccgcttaggcggattcagtacaatgttatatttttcgtaccaactcatttaaatatcataatctaaaatagttctgtaatatgtctagcgctaatatattgatcataatcctgtgcataaattaagatacaacaatgtctcgaaatcatcgacatggcttcttccatagttagaagatcgtcgtcaaagttagcaacgtgattcatcaacatttgctgttttgaggcagcaaatactgaaccgtcgccattcaaccattcataaaaaccatcgtctgaatccattgataatttcttgtactggtttttgagagctcgcatcaatctagcatttctagctcccggattgaaaacagaaagaggatcgtacatccagggtccattttctgtaaatagaatcgtataatgtcccttcaagaagatatcagacgatccacaatcaaagaattggtctccgagtttgtaacaaactgcggactttaacctatacatgataccgtttagcataatttctggtgatacgtcaatcggagtatcatctattagagatctaaagccggtgtaacattctccaccaaacatattcttattctgacgtcgttctacataaaacatcattgctccattaacgataacaggggaatgaacagcactacccatcacattagttcccaatggatcaatgtgtgtaactccagaacatcttccatagcctatgttaggaggagcgaacaccactcttccactattgccatcgaatgccatagaataaatatccttggaattgatagaaatcggactgtcggatgttgtgatcatcttcataggattaacaactatgtatggtgccgcctgaagtttcatatcgtaactgatgccgtttataggtctagccacagaaaccaacgtaggtctaaatccaactatagacaaaatagaagccaatatctgttcctcatctgtcataacttgagagcatccagtatgaataatcttcattagatggggatctaccgcatcatcatcgttacaataaaaaattcccattctaatgttcataattgcttttctaatcatggtatgcatgtttgctctctgaatctctgtggaaattagatctgatacacctgtaatcactatcggattatcctccgtaagacgattaaccaacaacatataattataagactttacttttctaaattcataaagttgctggattaggctataggtgtctccatgtacatacgcgttctcgagcgcaggaagtttaataccgaatagtgccatcagaataggatgaatatagtaattagtttctggttttctataaataaaagacaaatcttgtgaactagacatatcggtaaaatgcatggattggaatcgtgtagtcgacagaagaatatgatgattagatggagagtatattttatctaactctttgagttggtcaccgattctaggactagctcgagaatgaataagtactaaaggatgagtacatttcacagaaacactagcattgttcaatgtgctctttacatgggtaaggagttgaaatagctcgtttctatttgttctgacaatatttagtttattcataatgttaagcatatcctgaatagtaaagttagatgtgtcatacttgttagtagttagatatttagcaattgcattcccatcatttctcaatctcgtactccaatcatgcgtggatgctacttcgtcgatggaaaccatacaatcctttttgataggctgttgagattgattatttcctgcacgtttaggtttggtacgttgatttctagcccctgcggatataaagtcatcgtctacaatttgggacaatgaattgcatacactacaagacaaagatttatcagaagtgtgaatatgatcttcatctaccaaagaaagagtttgattagtataactagattttagtcctgcgttagatgttaaaaaaacatcgctattgaccacggcttccattatttatattcgtagtttttactcgaaagcgtgattttaatatccaatcttattacttttggaatcgttcaaaacctttgactaattgtagaatttgatctattgccctacgcgtatactcccttgcatcatatacgttcgtcaccagatcgtttgtttcggcctgaagttggtgcatatctctttcaacattcgacatgagatccttaagggccatatcgtctagattttgttgagatgctgctcctggatttggattttgttgtgctgttgtacatactgtaccaccagtaggtgtaggagtacatacagtggccacaataggaggttgaggaggtgtaaccgttggagtagtacaagaaatatttccatccgattgttgtgtacatgtagttgttggtaacgtctgagaaggttgggtagatggcggtgtcgtcgtcttttgatctttattaaatttagagataatatcctgaacagcattgctcggcgtcaacgctggaaggagtgaactcgccggcgcatcagtatctgcagacagccaatcaaaaagattagacatatcagatgatgtattagtttgttgtcgtggttttggtgtaggagcagtactactaggtagaagaataggagccggtgtagctgttggaaccggctgtggagttatatgaatagttggttgtagcggttggataggctgtctgctggcggccatcatattatctctagctagttgttctcgcaactgtctttgataatacgactcttgagactttagtcctatttcaatcgcttcatcctttttcgtatccggatccttttcttcagaataatagattgacgactttggtgtagaggattctgccagcctctgtgagaacttgttaaagaagtccatttaaggctttaaaattgaattgcgattataagattaaatggcagacacagacgatattatcgactatgaatccgatgatctcaccgaatacgaggatgatgaagaagaggaagaagatggagagtcactagaaactagtgatatagatcccaaatcttcttataagattgtagaatcagcatccactcatatagaagatgcgcattccaatcttaaacatatagggaatcatatatctgctcttaaacgacgctatactagacgtataagtctatttgaaatagcgggtataatagcagaaagctataacttgcttcaacgaggaagattacctctagtttcagaattttctgacgaaacgatgaagcaaaatatgctacatgtaattatacaagagatagaggagggttcttgtcctatagtcatcgaaaagaacggagaattgttgtcggtaaacgattttgacaaagatggtctaaaattccatctagactatattatcaaaatttggaaacttcaaaaacgatattagaatttatacgaatatcgttctctaaatgtcacaatcaagtctcgcatgttcagcaatttattgtcgtactttatatcgtgttcattaacgatattttgcaaaatagtaatgattctatcttccttcgatagatattcttcagagattattgtcttatattctttcttgttatccgatatgaatttgataagactttgaacattattgatacccgtctgtttaattttttctacagatattttagttttggcagattctatcgtatctgtcaatagacatccaacatcgacattcgacgtcaattgtctataaatcaacgtataaattttagaaataacattagcgaattgttgtgcattgatgtcgttattctgaaacagtatgattttaggtagcattttcttaacaaagagaacgtatttattgttactcagttgaacagatgatatatccagattactaacgcatctgattccgtataccaaactttcagaagaaatggtatacaattgtttgtattcattcaatgtctctttttcagaaattagtttagagtcgaatactgcaataattttcaagagatagttttcatcagataagattttatttagtgtagatatgataaaactattgttttgttggagaacttgatacgccgcgttctctgtagtcgacgctctcaaatgggaaacaatctccattatttttttggaatcggatactatatcttcggtatcttgacgcagtctagtatacatagagttaagagagattagagtttgtacattaagcaacatgtctctaaatgtggctacaaacttttcctttttcacatcatctagtttattatataccgatttcacaacggcaccagatttaaggaaccagaatgaaaaactctgataactacaatatttcatcatagttacgattttatcatcttctatagttggtgtaatagcgcatacctttttctccaagactggaaccaacgtcataaaaatgtttaaatcaaaatccatatcaacatctgatgcgctaagaccagtctcgcgttcaagattatctttactaatggtgacgaactcatcgtataaaactctaagtttgtccattatttatttacagatttagttgtttaatttatttgtgctcttccagagttgggatagtatttttctaacgtcggtattatattattaggatctacgttcatatgtatcataatattaatcatccacgttttgataaatctatctttagcttctgaaataacgtatttaaacaaaggagaaaaatatttagctacggcatcagacgcaataacattttttgtaaatgtaacgtatttagacgacagatcttcgttaaaaagttttccatctatgtagaatccatcggttgttaacaccattcccgcgtcagattgaataggagtttgaatagtttgttttggaaatagatccttcaataacttatagttgggtgggaaaaaatcgattttatcactagactctttcttttttactatcattacctcatgaactatttcttgaatgagtatatgtattttctttcctatatcggacgcgttcattggaaaatataccatgtcgttaactataagaatatttttatcctcgtttacaaactgaataatatcagatgtagttcgtaaacgaactatatcatcaccagcacaacatctaactatatgatatccactagtttcctttagccgtttattatcttgttccatattagcagtcattccatcatttaagaaggcgtcaaagataatagggagaaatgacattttggattctgttacgactttaccaaaattaaggatatacggacttactatctttttctcaacgtcaatttgatgaacacacgatgaaaatgtgcttctatgagattgatcatgtagaaaacaacaagggatacaatatttccgcatatcatgaaatatattaagaaatcccaccttattatatttccccaaaggatccatgcacgtaaacattatgccgttatcattaataaagacttctttctcatcggatctgtaaaagttgttactgatttttttcattccaggatctagataattaataatgatgggttttctattcttattctttgtattttggcatatcctagaccagtaaacagtttccactttggtaaaatcagcagacttttgaacgctattaaacatggcattaatggcaataactaaaaatgtaaaatatttttctatgttaggaatatggtttttcactttaatagatatatggtttttggccaaaatgatagatatttttttatccgaggatagtaaaatattattagtcgccgtctctataaaaatgaagctagtctcgatatccaattttattctagaattgataggagtcgccaaatgtaccttatacgttatatctcccttgatgcgttccatttgtgtatctatatcggacacaagatctgtaaatagttttacgttattaatcatcacggtatcgccgtcgctagataacgctaatgtaccatccaagtcccaaatggagagatttaactgttcatcgtttagaataaaatgattaccggtcatattaataaagtgttcatcgtatctagataacaacgacttataattaatgtccaagtcttgaactcgctgaatgatcttttttaacccagttagttttagattggtacgaaatatattgttaaactttgattctacagtaatgtccaaatctagttgtggaaatacttccatcaacattgtttcaaacttgataatattattatctacatcttcgtacgatccaaattccggaatagatgtatcgcacgctctggccacccagataaccaaaaagtcacacgctccaggatatacattgtataaaaagctatcgttttttagtagggtttttttctgcgtgtatacgaagggattaaaaatagtattatcaacgtaactatattccaaattattcttatgagaatagataataatatcgtccttaatatctaacaaatttcctaaatatccctttaattgagtcattcgaagcgtcaatagaatatgtctcttaactatttccggctgttgtatatttaaatgacttcgtaaaaaataatatatgggcgacttctcatctatgtaatcatatggagtgagatatagggctcgttctacctcctgccccttacccacctgtaataccaattgcggacttactatatatcgcatatttatatcgtggggtaaagtgaaaatctactaccgatgatgtaagtcttacaatgttcgaaccagtaccagatcttaatttggaggcctccgtagaactaggggaggtaaatatagatcaaacaacacctatgataaaggagaatagcggttttatatcccgcagtagacgtctattcgcccatagatctaaggatgatgagagaaaactagcactacgattctttttacaaagactttattttttagatcatagagagattcattatttgttcagatgcgttgacgctgtaaaagacgtcactattaccaaaaaaaataacattatcgtggcgccttatatagcacttttaactatcgcatcaaaaggatgcaaacttacagaaacaatgattgaagcattctttccagaactatataatgaacatagtaagaaatttaaattcaactctcaagtatccatcatccaagaaaaactcggataccagtttggaaactatcacgtttatgattttgaaccgtattactctacagtagctctggctattcgagatgaacattcatctggcatttttaatatccgtcaagagagttatctggtaagttcattatctgaaataacatatagattttatctaattaatctaaaatctgatcttgttcaatggagtgctagtacgggcgctgtaattaatcaaatggtaaatactgtattgattacagtgtatgaaaagttacaactggtcatagaaaatgattcacaatttacatgttcattggctgtggaatcaaaacttccaataaaattacttaaagatagaaatgaattatttacaaaattcattaacgagttaaaaaagaccagttcattcaagataagcaaacgcgataaggatacgctactaaaatattttacttaggactggagttagaatttatagacgactcatttcgtttatcattgttactattattactattactatcattattagtgttggcattattagtattcttcttgtcatcttgttcagaaatatacagcaatgctatacctaatactaaatacattatcatgctcgcaatggctctaacaacaacgaaccaaaatgaatttggtcgtagcttttgttcacaaaaatacataaagaaatgtctacataaatctatggcgccattggctacttgaaatagcgccagtcctcctacagattttaatatagctgtataacatgacatttattcatcatcaaaagagacagagtcaccatctgtcatatttagattttttttcatgtgttcaaagtatcctctactcatttcattataatagtttatcatacttagaattttaggacggatcaatgagtaagacttgactagatcgtcagtagtaatttgtgcatcgtctattctgcatccgcttcgtcgaataatgtatagcatcgctttgagattctccatagctatcaagtctttatacaatgacatggaaatatctgtgaatactttatacttctccaacatcgatgccttaacatcatcgcctactttagcattgaaaatacgttctattgtgtagatggatgtagcaagatttttaaacaacaatgccatcttacacgatgattgcctcaagtctccaatcgtttgtttagaacgattagctacagagtccaatgcttggctgactagcatattattatctttagaaattgtattcttcaatgaggcgtttatcatatctgtgatttcgttagtcatattacagtctgactgggttgtaatgttatccaacatatcacctatggatacggtacacgtaccagcatttgtaataatcctatctaagatgttgtatggcattgcgcagaaaatatcttctcctgtaatatctccactctcgataaatctactcagattattcttaaatgccttattctctggagaaaagatatcagtgtccatcatttcattaatagtatacgcagaaaagataccacgagtatcaattctatccaagatacttatcggttccgagtcacagataatggtttcctctccttcgggagatcctgcatagaaatatctaggacaatagtttctatactgtctgtaactctgataatctctaaagtcactaactgataccatgaaattgagaagatcaaacgctgaagtaattaatttttctgcctcgtttttactacaactagttttcatcaatgtagtgacgatgtattgtttagttacttttggtctaatactgatgatagagatattattgcttcccataatggatcttctagtagtcaccttaaagcccattgatgcgaatagcagatagataaagtcttggtatgactcctttctaatatagtacggactacctttgtcacccaactttatacccacataagccataacaacctctttaatagccgtttcatgaggtttatcagccatgagcctgagtagttggaagaatctcatgaatcccgtctcagaaagtcctatatgcatgatagatttatctttcctgggaaactctcgtatagtcatagatgaaatactctttaaagtttctgaaataagattagtaacagtcttacctccgactactctaggtaacaaacaaactctaataggtgttttctctgcggagataatatcagaaaggatagagcaataagtagtattattgtgattataaagaccgaatacataacaggtagaatttataaacatcatgtcctgaaggtttttagacttgtattcctcgtaatccataccgtcccaaaacatggatttggtaactttgatagccgtagatctttgttccttcgccaacaggttaaagaaattaataaagaatttgttgtttctatttatgtccacaaattgcacgtttggaagcgccacggttacattcactgcagcattttgaggatcgcgagtatgaagtacgatgttattgtttactggtatatctggaaagaaatctaccagtctaggaataagagattgatatcgcatagaaatagtaaagtttataatctcatcatcgaagagcattttgttaccattgtaataaatatccactctgtcatatgtataaatgaagtactgttcaaacatgatgagatgtttatatgttggcatagtagtgagatcgacgtttggtaatggcaatgtattaagattaactccataatgtctagcagcatctgcgatgttataagcgtcgtcaaagcggggtcgatcttgtattgttatatattgtctaacacctataagattatcaaaatcttgtctgcttaatacaccgttaacaatttttgccttgaattcttttattggtgcattaataacatccttatagaggatgttaaacaaataagtgttatcaaagttaagatctggatatttcttttctgctagaacatccattgagtcggagccatctggtttaatataaccaccgataaatctagctctgtattctgtatccgtcaatctaatattaagaaggtgttgagtgaaaggtggaagatcgtaaaagctgtgagtattaatgataggattagtttccgaactaatgttaattggggtattaataatatctatatttccagcgttaagtgtaacattaaacagttttaattcacgtgacgtggtatcaattaaataattaatgcccaatttggatatagcagcctgaagctcatcttgtttagttacggatcctaatgagttattaagcaatatatcgaacggatgaacgaaggttgttttaagttggtcacatactttgtaatctagacatagatgcggaagaacggtagaaactatacgaaataaatattcagagtcctctaattgatcaagagtaactattgacttaataggcatcatttatttagtattaaatgacgaccgtaccagtgacggatatacaaaacgatttaattacagagttttcagaagataattatccatctaacaaaaattatgaaataactcttcgtcaaatgtctattctaactcacgttaacaacgtggtagatagagaacataatgccgccgtagtgtcatctccagaggaaatatcctcacaacttaatgaagatctatttccagatgatgattcaccggccactattatcgaacgagtacaacctcatactactattattgacgatactccacctcctacgtttcgtagagagttattaatatcggaacaacgtcaacaacgagaaaaaagatttaatattacagtatcgaaaaatgctgaagcaataatggaatctagatctatgataacttctataccaacacaaacaccatccttgggagtagtttatgataaagataaaagaattcagatgttagaggatgaagtggttaatcttagaaatcaacgatctaatacaaaatcatctgataatttagataattttaccaaaatactatttggtaagactccgtacaaatcaacagaagttaataagcgtatagccatcgttaattatgcaaatttgaacgggtcccccttatcagtcgaggacttggatgtttgttcggaggatgaaatagatagaatctataaaacgattaaacaatatcacgaaagtagaaaacgaaaaattatcgtcactaacgtgattattattgtcataaacattatcgagcaggcattgctaaaactcggatttgaagaaatcaaaggactgagtaccgatatcacttcagaaattatcgatgtggagatcggagatgactgcgatgctgtagcatctaaactaggaatcggtaacagtccggttcttaatattgtattgtttatactcaagatattcgttaaacgaattaaaattatttaatttaatacattcccatatccagacaacaatcgtctggattaatctgttcctgtcgtctcataccggacgacatattaatctttttattagtgggcatctttttagatggtttctttttcccagcattaactgagtcgatacctagaagatcgtgattgatctctccgaccattccacgaacttctaattggccgtctctgacggtaccataaactattttaccagcattagtaacagcttggacaatctgaccatccatcgcattgtacgatgtagtagtaactgttgttctacgtctaggagcaccagaagtatttttggagcccttggatgttgatgtagaagaagacgaggattttgattttggtttacatgtaatacattttgaactctttgattttgtatcacatgcgccggcagtcacatctgtttgagaattaagattattgttgcctcctttgacggctgcatctccaccgatttgcgctagtagatttttaagctgtggtgtaatcttattaactgtttcgatataatcatcgtaactgcttctaacggctaaattttttttatccgccatttagaagctaaaaatatttttatttatgcagaagatttaactagattatacaatgaactaatatgatccttttccagattatttacaaacttggtattttttggttctggaggaggcgaatttaaattcggacttggattcggattttgtaagttcttgatcttattatacatcgagtataggatggcgacagtaactgctacacaaataccgatcaaaagaagaataccaatcatttattgacaataacttcactattgatcaagtatgcaatatatcatcttttcactaaataagtagtaataatgattcaacaatgtcgagatatatggacgataataatttagttcatggaaatatcgctatgattggtgtgaatgactccgctaactctgtggggtgcgcagtgctttccccacatagaataaattagcattccgactgtgataataataccaagtataaacgccataatactcaatactttccatgtacgagtgggactggtagacttactaaagtcaataaaggcgaagatacacgaaagaatcaaaagaatgattccagcgattagcacgccggaaaaataatttccaatcataagcatcatgtccatttaactaataaaaattttaaatcgccgaatgaacaaagtggaatataaaccatataaaaacaatagtttgtactgcaaaaataatatctatttttgttttcgaagatatggtaaaattaaatagtagtacacagcatgttataactaacagcagcaacggctcgtaattacttatcatttactagacgaaaaggtggtgggatattttcttgctcaaataatacgaatatatcacccatccattttatgcgatgtttatatactctaatctttaatagatctatagacgacgggtttaccaacaatatagattttatcgattcatctaatttaaacccttccttaaacgtgaatgatctattatctggcataacgatgaccctacctgatgaatcggacaatgtactgggccatgtagaataaattatcaacgaattatcgtctacgaacatttatatcatttgttttaattttaggacgcgaataaatggatataaaatagaaaataacagatattacaaccagtgttatggccgcgcccaaccaggtaggcagttttattttatcttttactacaggttctcctggatgtacgtcaccaacggcggacgtagttctagtacaattagacgtaagttccgcttgggaattttttaacgctaaagagttaacgttaatcgtgcacccaacgtatttacatctagttcgttgaacatcttgattataatataaccattttctatctctagattcgtcagtgcactcatgtaaccaacataccctaggtcctaaatatttatctccggaattagattttggataattcgcgcaccaacaatttctatttcctttatgatcgttacaaaagacgtataatgccgtatccccaaaagtaaaataatcaggacgaataattctaataaactcagaacaatatctcgcatccatatgtttggagcaaatatcggaataagtagacatagccggtttccgttttgcacgtaaccattctaaacaattggggtttccaggatcgtttctacaaaatccagtcatgaaatcgtcacaatgttctgtcttgtaattattattaaatatttttggacagtgtttggtatttgtcttagaacaacattttgccacgctatcactatcgcccaggagataatccttttttataaaatgacatcgttgcccggatgctatataatcagtagcgtgttttaaatccttaatatattcaggagttacctcgttctgataatagattaatgatccaggacgaaatttgaaagaactacatggttctccatgaattaatacatattgtttagcaaattcaggaactataaaactactacaatgatctatcgacataccatctatcaaacaaaacttgggtttaatttctcccggagatgtttcataatagtacgtataactttcttctgcaaacttaacagctctattatattcaggataattaaaacctaattccatatatttgtctcgtatatctgctattcctggtgctattttgattctattaagagtaacagctgcccccattcttaataatcgtcagtatttaaactgttaaatgttggtatatcaacatctaccttatttcccgcagtataaggtttgttgcaggtatactgttcaggaatggttacatttatacttcttctatagtcctgtctttcgatgttcatcacatatgcaaagaacagaataaacaaaataatgtaagaaataatattaaatatctgtgaattcgtaaatacattgattgccataataattacagcagctacaatacatacaatagacattcccacagtgttgccattacctccacgatacatttgagttactaagcaataggtaataactaagctagtaagaggcaatagaaaagatgagataaatatcatcaatatagagattagaggagggctatatagagccaagacgaacaaaatcaaaccgagtaacgttctaacatcattatttttgaagattcccaaataatcattcattcctccataatcgttttgcatcatacctccatctttaggcataaacgattgctgctgttcctctgtaaataaatctttatcaagcactccagcacccgcagagaagtcgtcaagcatattgtaatatcttaaataactcatttatatattaaaaaatgtcactattaaagatggagtataatctttatgccgaactaaaaaaaatgacttgtggtcaacccctaagtctttttaacgaagacggggatttcgtagaagttgaaccgggatcatcctttaagtttctgatacctaagggattttacgcctctccttccgtaaagacgagtctagtattcgagacattaacaacgaccgataataaaatcactagtatcaatccaacaaatgcgccaaagttatatcctcttcaacgcaaagtcgtatctgaagtagtttctaatatgaggaaaatgatcgaatcaaaacgtcctctatacattactcttcacttggcgtgtggatttggtaagactattaccacgtgttatcttatggctacacacggtagaaaaaccgtcatttgcgtacccaataaaatgttaatacatcaatggaagacacaggtagaggcagtcggattggaacataagatatccatagatggagtaagtagtctattaaaggaactaaagactcaaagtccggatgtattaatagtagtcagtagacatctgacaaacgatgccttttgtaaatatatcaataagcattatgatttgttcatcttggatgaatcacatacgtataatctgatgaacaatacagcagttacaagatttttagcgtattatcctccgatgatgtgttattttttaactgctacacctagaccatctaaccgaatttattgtaacagtattattaatattgccaagttatccaatctaaaaaaaactatctatgcagtagatagtttttttgagccatattccacagataatattagacatatggtaaaacgactagatggaccatctaataaatatcatatatataccgagaagttattatctgtagacgagcctagaaatcaacttattcttgataccctggtagaagaattcaagtcaggaactattaatcgcattttagttattactaaactacgtgaacatatggtattattctacaaacgattattagattttttcggaccagaggttgtatttataggagacgcccaaaatagacgtactccagatatggtcaaatcaatcaaggaactaaatagatttatattcgtatccaccttattttattccggtactggtttagatattcctagtttggattcgttgttcatttgctcggcagtaatcaacaatatgcaaatagagcaattactagggagggtatgtcgagaaacagaactattagataggacggtatatgtatttcctaacacatccatcaaagaaataaagtacatgataggaaatttcatgcaacgaattattagtctgtctgtagataaactaggatttaaacaaaaaagttatcggaaacatcaagaatccgatcccacttctgcatgtacaacatcatccagagaagaacgtgtattaaatagaatatttaactcgcaaaatcgttaagaagtttaagcgacgatccgcatgctgcgcaggccagtgtattacccctcatagtattaatataatccaatgatacttttgtgatgtcggaaatcttaaccaatttagactgacaggcagaacacgtcatgcaatcatcatcgtcatcgataactgtagtcttgggcttctttttgcgactcttcattccggaacgcacattggtgctatccatttaggtagtaaaaaataagtcagaatatgccctataacacgatcgtgcaaaacctggtatatcgtctctatctttatcacaatatagtgtatcgacatttttattattattgacctcgtttatcttggaacatggaatgggaacatttttgttatcaacggccatctttgccttaattccagatgttgtaaaattataactaaacagtctatcatcgacacaaatgaaattcttgtttagacgtttgtagtttacgtatgcggctcgttcgcgtctcattttttcagatattgcaggtactataatattaaaaataagaatgaaataacataggattaaaaataaagttatcatgacttctagcgctgatttaactaacttaaaagaattacttagtctgtacaaaagtttgagattttcagattctgcggctatagaaaagtataattctttggtagaatggggaacatctacttactggaaaataggcgtgcaaaaggtagctaatgtcgagacgtcaatatctgattattatgatgaggtaaaaaataaaccgtttaatattgatccgggctattacattttcttaccggtatattttgggagcgtctttatttattcgaagggtaaaaatatggtagaacttggatctggaaactcttttcaaataccagatgatatgcgaagtgcgtgtaacaaagtattagacagcgataacggaatagactttctgagatttgttttgttaaacaatagatggataatggaagatgctatatcaaaatatcagtctccagttaatatatttaaactagctagtgagtacggattaaacatacccaaatatttagaaattgaaatagaggaagacacattatttgacgacgagttatactctattatagaacgctctttcgatgataaatttccaaaaatatccatatcgtatattaagttgggagaacttagacggcaagttgtagactttttcaaattctcattcatgtatattgagtccatcaaggtagatcgtataggagataatatttttattcctagcgttataacaaaatcaggaaaaaagatattagtaaaagatgtagaccatttaatacgatccaaggttagagaacatacatttgtaaaagtaaaaaagaaaaacacattttccattttatacgactatgatggaaacggaacagaaactagaggagaagtaataaaacgaattatagacactataggacgagactattatgttaacggaaagtatttctctaaggttggtagtgcaggcttaaagcaattgactaataaattagatattaatgagtgcgcaactgtcgatgagttagttgatgagattaataaatccggaactgtaaaacgaaaaataaaaaaccaatcagcatttgatttaagcagagaatgtttgggatatccagaagcggattttataacgttagttaataacatgcggttcaaaatagaaaattgtaaggttgtaaatttcaatattgaaaatactaattgtttaaataacccgagtattgaaactatatatggaaactttaaccagttcgtctcaatctttaatgtcgtcaccgatgtcaaaaaaagattattcgagtgaaataatatgcgcctttgatataggtgcaaaaaatcctgccagaactgttttagaagtcaaggataactccgttagggtattggatatatcaaaattagactggagttctgattgggaaaggcgcatagctaaagatttgtcacaatatgaatacactacagttcttctagaacgtcagcctagaaggtcgccgtatgttaaatttatctattttattaaaggctttttatatcatacatcggctgccaaagttatttgcgtctcgcctgtcatgtctggtaattcatatagagatcgaaaaaagagatcggtcgaagcatttcttgattggatggacacattcggattgcgagactccgttccggatagacgcaaattagacgatgtagcggatagtttcaatttggctatgagatacgtattagataaatggaatactaattatacaccttataataggtgtaaatctagaaattacataaaaaaaatgtaataacgttagtaacgccattatggataatctatttacctttctacatgaaatagaagatagatatgccagaactatttttaactttcatctaataagttgcgatgaaataggagatatatatggtcttatgaaagaacgcatttccttagaggatatgtttgataatatagtgtataataaagatatacatcctgccattaagaaactagtgtattgcgacatccaacttactaaacacattattaatcagaatacgtatccggtatttaacgattcttcacaagtgaaatgttgtcattatttcgacataaactcagataatagcaatattagctctcgtacagtagagatatttgagagggaaaagtcatctcttgtatcatatattaaaactaccaataagaagagaaaggtcaattacggcgaaataaagaaaactgttcatggaggcactaatgcaaattacttttccggtaaaaagtctgacgagtatctgagtactacagttagatccaacattaatcaaccttggatcaaaaccatctctaagaggatgagagttgatatcattaatcactctatagtaacgcgtggaaaaagctctatattacaaactatagaaattatttttactaatagaacatgtgtgaaaatattcaaggattctactatgcacattattctatccaaggacaaggatgaaaaggggtgtatacacatgattgacaaattattctatgtctattataatttatttctgttgttcgaagatatcatccaaaacgagtactttaaagaagtagctaatgttgtaaaccacgtactcacggctacggcattagatgagaaattattcctaattaagaaaatggctgaacacgatgtttatggagttagcaatttcaaaatagggatgtttaacctgacatttattaagtcgttggatcataccgttttcccctctctgttagatgaggatagcaaaataaagttttttaaggggaaaaagctcaatattgtagcattacgatctctggaggattgtataaattacgtgactaaatccgagaatatgatagaaatgatgaaggaaagatcgactattttaaatagcatagatatagaaacggaatcggtagatcgtctaaaagaattgcttctaaaatgaaaaaaaacactgattcagaaatggatcaacgactcggatataagtttttggtgcctgatcctaaagccggagttttttatagaccgttacatttccaatatgtatcgtattctaattttatattgcatcgattgcatgaaatcttgaccgtcaagcggccactcttatcgtttaagaataatacagaacgaattatgatagaaattagcaatgttaaagtgactcctccagattactcacctataatcgcgagtattaaaggtaagagttatgacgcattagccacgttcactgtaaatatctttaaagaggtaatgaccaaagagggtatatccatcactaaaataagtagttatgagggaaaagattctcatttgataaaaattccgctactaataggatacgggaataaaaatccacttgatacagccaagtatcttgttcctaatgtcataggtggagtctttatcaataaacaatctgtcgaaaaagtaggaattaatctagtagaaaagattacaacatggccaaaatttagggttgttaagccaaactcattcactttctcgttttcctccgtatcccctcctaatgtattaccgacaagatatcgccattacaagatatctctggatatatcacaattggaagcgttgaatatatcatcgacaaagacatttataacggtcaatattgttttgctgtctcaatatttatctagagtgagtctagaattcattagacgtagtttatcatacgatatgcctccagaagttgtctatctagtaaacgcgataatagatagtgctaaacgaattactgaatctattactgactttaatattgatacatacattaatgacctggtggaagctgaacacattaaacaaaaatctcagttaacgattaacgagttcaaatatgaaatgctgcataactttttacctcatatgaactatacacccgatcaactaaagggattttatatgatatctttactaagaaagtttctctactgtatcttccacacttctagatatccagatagagattcgatggtttgtcatcgcatcctaacgtacggcaaatattttgagacgttggcacatgatgaattagagaattacataggcaacatccgaaacgatatcatgaacaatcacaagaacagaggcacttacgcggtaaacattcatgtactaacaactcccggacttaatcacgcgttttctagcttattgagtggaaagttcaaaaagtcagacggtagttatcgaacacatcctcactattcatggatgcagaatatttctattcctaggagtgttggattttatccggatcaagtaaagatttcaaagatgttttctgtcagaaaataccatccaagtcaatatctttacttttgttcatcagacgttccggaaagaggtcctcaggtaggtttagtatctcaattgtctgtcttgagttccattacaaatatactaacgtctgagtatttggatttggaaaagaaaatttgtgagtatatcagatcatattataaagatgatataagttactttgaaacaggatttccaatcactatagaaaatgctctagtcgcatctcttaatccaaatatgatatgtgattttgtaactgactttagacgtagaaaacggatgggattcttcggtaacttggaggtaggtattactttagttagggatcacatgaatgaaattcgcattaatattggagcgggaagattagtcagaccattcttggttgtggataacggagagctcatgatggatgtgtgtccggagttagaaagcagattagacgacatgacattctctgacattcagaaagagtttccgcatgtcatcgaaatggtagatatagaacaatttacttttagtaacgtatgtgaatcggttcaaaaatttagaatgatgtcaaaggatgaaagaaagcaatacgatttatgtgactttcctgccgaatttagagatggatatgtagcatcttcactagtgggaatcaatcacaattctggacccagagctattcttggatgtgctcaagctaaacaagctatctcttgtctgagttcggatatacgaaataaaatagacaatggaattcatttgatgtatccagagaggccaatcgtgattagtaaggctttagaaacttcaaagattgcggctaattgcttcggccaacatgttactatagcattaatgtcgtacaaaggtatcaatcaagaggatggaattatcatcaaaaaacaatttattcagagaggcggtctcgatatagttaccgcaaagaaacatcaagtagaaattccattggaaaactttaataacaaagaaagagataggtctaacgcctattcaaaattagaaagtaatggattagttagactgaatgctttcttggaatccggagacgctatggcacgaaatatctcatcaagaactcttgaagatgattttgctagagataatcagattagcttcgatgtttccgagaaatataccgatatgtacaaatctcgcgttgaacgagtacaagtagaacttactgacaaagttaaggtacgagtattaaccatgaaagaaagaagacccattctaggagacaaatttaccactagaacgagtcaaaagggaacagtcgcgtatgtcgcggatgaaacggaacttccatacgacgaaaatggtatcacaccagatgtcattattaattctacatccatcttctctagaaaaactatatctatgttgatagaagttattttaacagccgcatattctgctaagccgtacaacaataagggagaaaaccgacctgtctgttttcctagtagtaacgaaacatccatcgatacatatatgcaattcgctaaacaatgttatgagcattcaaatccgaaattgtccgatgaagaattatcggataaaatcttttgtgaaaagattctctatgatcctgaaacggataagccttatgcatccaaagtattttttggaccaatttattacttgcgtctgaggcatttaactcaggacaaggcaaccgttagatgtagaggtaaaaagacgaagctcattagacaggcgaatgagggacgaaaacgtggaggaggtatcaagttcggagaaatggagagagactgtttaatagcgcatggtgcagccaatactattacagaagttttgaaagattcggaagaagattatcaagatgtgtatgtttgtgaaaattgtggagacatagcagcacaaatcaagggtattaatacatgtcttagatgttcaaaacttaatctctctcctctcttaacaaaaattgataccacgcacgtatctaaagtatttcttactcaaatgaacgccagaggcgtaaaagtcaaattagatttcgaacgaaggcctccttcgttttataaaccattagataaagttgatctcaagccgtcttttctggtgtaatattctagtttggtagtagatacatatcaatatcatcaaattcgagatccgaattataaaatgggcgtggattgttaactatagaatcggacgtctgatattcgaaaatctgtggagtttcaggttttggtggaggtgtaactgctacttgggatactgaagtctgatattcagaaagctgtggatgttctggttcggcatccaccgatggtgtcacatcactaatcggttcggtaacgtctgtggatggaggtgctacttctacagaacctgtagcctcagttgtcaacggagatacatttttaatgcgagaaaatgtataatttggtaatggtttcttatgtggatctgaagaagaggtaagatatctactagaaagataccgatcacgttctagttctcttttgtagaacttaactttttctttctccgcatctagttgatattccaacctcttcacgttactacgttcagattccaattcacgttcgcatgggttacctccgcagtttttacgagcgatttcacgttcagccttcatgcgtctctccctctctctatcgagtttatcagagcagtctttctgaaggcgatcgaactccataaatttctccaacgctttgattgtttccatagatttccgaagttcagcttttaggactgtgattctttttctttcgaattcacagctggatgtacaaccgtttccattaccgccatctctaagtttcttttctagatcggcaacatttcatccccatgccttttacattcctcgagtctactgtcgtcgaaatatcgttccagctccttttcgacatcaataactttagcacgttgtctctcaagctctcttttgtagttatctgattccctggcacgtttaagatcttcatgcaattgagtcagctcttaacttcctctcttgcttcttcgtcatagtacgcgcaatcactgtgagatccattgttaccacgtctacactcggcgagctcgcgtttaagagattcaatttcccgtttgtattggtccatgtttccattgctaccaccattagatttacaggctgctagttgtcgttcgagatcagaaatacgggttttcttggaattgatttcgtcgatgtacttggcatcgaaacacttattaagttctttttccaattctacgattttatttctttcgcgagtcaattccctcctgtagtaactatctgttttgtcagattcacgctctctacgtagactttcttgcaagttactaatttgttccctagcacgtccgagtttagttttatatgctgaatagagttctgattcatcctttgagcagatctctagcgatcgtttaagattcctaattctagtctttagcctatttacctcctcagaagatgttccgttaccgttgcgtttacactcgttaagctgtctatcaagatccatgattctatctctaagacgttgcatctctctttccatatcagcattgctttcattattacgtctgcagtcactcaactgtctttcaatatctgagattctatctctaagacgtcgcatctctctctgtttcggcattggtttcattattacgtctacagtcgttcaactgtctttcaagatctgatattctagattggagtctgctaatctctgtagcattttcacggcattcactcagttgtctttcaagatctgaaattttagattggagtctgctaatctctgtaagatttcctcctccgctctcgatgcagtcggtcaacttattctctagttctctaatacgcgaacgcagtgcatcaacttcttgcgtgtcttcctggttgcgtgtacattcatcgagtctagattcgagatctctaacgcgtcgtcgttcttcctcaagttctctgcgtactacagaaagcgtgtccctatcttgttgatatttagcaatttctgattctagagtactgattttgcttacgtagttactaatatttgtcttggccttatcaagatcctccttgtatttgtcgcattccttgatatccctacgaagtctggacagttcccattcgacattacgacgtttatcgatttcagctcggagatcgtcatcgcgttgttttagccacatacgactgagttcaagttctcgttgacaagatccatctacttttccattcctaatagtatccagttccttttctagttctgaacgcatttctcgttccctatcaagcgattctctcaattctcggatagtcttcttatcaatttctaataaatctgaaccatcatctgtcccattttgaatatccctgtgttctttgatctcttttgtaagtcggtcgattctttcggttttataaacagaatccctttccaaagtcctaatcttactgagtttatcactaagttctgcattcaattcggtgagttttctcttggcttcttccaactctgttttaaactctccactatttccgcattcttcctcgcatttatctaaccattcaattagtttattaataactagttggtaatcagcgattcctatagccgttcttgtaattgtgggaacataattaggatcttctaatggattgtatggcttgatagcatcatctttatcattattagggggatggacaaccttaattggttggtcctcatctcctccagtagcgtgtggttcttcaataccagtgttagtaataggcttaggcaaatgcttgtcgtacgcgggcacttcctcatccatcaagtatttataatcgggttctacttcagaatattcttttctaagagacgcgacttcgggagttagtagaagaactctgtttctgtatctatcaacgctggaatcaatactcaagttaaggatagcgaatacctcatcgtcatcatccgtatcttctgaaacaccatcatatgacatttcatgaagtctaacgtattgataaatagaatcagatttagtattaaacagatccttaacctttttagtaaacgcatatgtatattttagatctccagatttcataatatgatcacatgccttaaatgtcagtgcttccatgatataatctggaacactaatgggtgacgaaaaagatacagcaccatatgctacgttgataaataaatctgaaccactaagtagataatgattaatgttaagaaagaggaaatattcagtgtataggtatgtcttggcgtcatatcttgtactaaacacgctaaacagtttgttaatgtgatcaatttccaatagattaattagagcagcgggaataccaacaaacatattaccacatccgtattttctatgaatatcacatatcatgttaaaaaatcttgatagaagagcgaatatctcgtctgacttaatgagtcgtagttcagcagcaacataagtcataactgtaaatagaacatactttcctgtagtgttgattctagactccacatcaacaccattattaaaaatagttttatatacatctttaatctgctctccgttaatcgtcgaacgttctagtatacggaaacactttgatttcttatctgtagttaatgacttagtgatatcacgaagaatattacgaattacatttcttgtttttcttgagagacctgattcagaactcaactcatcgttccatagtttttctacctcagtggcgaaatctttggagtgcttggtacatttttcaataaggttcgtgacctccatttattataaaaaatttattcaaaacttaactacaatcgggtaattataaaatcgtagatctcccatgtggcggaatactaccatctatcgcatgtggatggacagtaggtaatggccatgggaacagtaatgtttgcatatttatctttcttgccagtattactgcatattgtcccaatgtttcgatgtgatgttctaacctatcaactgccgctgtatcacaacaatagtgtccgatgaaattaagattatgatccaatgtgtttaatatatgattatcaagtcttatacgatccgcgtcttttttgacaggatcaggttcttctacaggaagaagtttcggcctcttatgatattcatgtctgggaaacggtggtctagggtgaggctccggtatcggagtgggttttggattataatcatcatcgtctatgacatcatcttcgacttcgatatttattttgctatcttgatgatgtcctgtatcagttgcattttcagcactcgactgaatattagcgcattcattgtctattattaccatatttctaaacccaaaatgtatgtgttgaacatcagtactatcgttgatgagtcttatagcatgaattcgcttatcgttatcgggtttatcttctgtcaccttagcaattccttttttattaaactctacataatcatatccatttctattgtttgttctaatataaacgagtatagcatcattgctaaatttttcaatagtatcaaaaacagaatatcctaaaccatataatatatattcaggaacactcaaactaaatgtccaggattctcctaaatacgtaaactttaatagtgcgaaatcattcaaaaatctaccacttatagatagatagtacataaatgcgtatagtagtctacctatctctttattatgaaaaccggcattacgatcatatatgtcgtgatatacctgtgatccgtttacgttaaaccataaatacatgggtgatcctataaacatgaatttatttctaattctcagagctatagttaattgaccgtgtaatatttgcttacatgcatacttgatacgcttattaataagatttttatcattgctcgttatttcagaatcgtatatataaggagtaccatcgtgattcttaccagatattatacaaaatactatatataaaatatattgaccaacgttagtaatcatataaatgtttaacgttttaaattttgtattcaatgatccattatcatacgctagcatggtcttatgatattcattctttaaaatataatattgtgttagccattgcattggggctcctaatggagattttttattctcatccattttaggataggctttcataaagtccctaataacttcgtgaataatgtttctatgttttctactgatgcatgtatttgcttcgatttttttatcccatgtttcatctatcatagatttaaacgcagtaatgctcgcaacattaacatcttgaaccgttggtacaattccgttccataaatttataatgttcgccatttatataactcattttttgaatatacttttaattaacaaaagagttaagttactcatatggacgccgtccagtctgaacatcaatctttttagccagagatatcatagccgctcttagagtttcagcgtgattttccaacctaaatagaacttcatcgttgcgtttacaacacttttctatttgttcaaactttgttgttacattagtaatctttttttccaaattagttagccgttgtttgagagtttcctcattgtcgtctccatcggctttaacaattgcttcgcgtttagcctctggctttttagcagcctttgtagaaaaaaattcagttgctggaattgcaagatcgtcatctccggggaaaagagttccgtccatttaaagtacagattttagaaactgacactctgcgttatttatatttggtacaacacatggattataaatattgatgttaataacatcagaaaatgtaaagtctatacattgttgcatcgtgttaaattttctaatggatctagtattattgggtccaacttctgcctgaaatccaaatatggaagcggatacaaaaccgtttcctggataaaccacacatctccacttttgctttacatcagaaattgtgtcgttgacatcttgaactctcctatctaatgccggtgttccacctatagattttgaatattcgaatgctgcatgagtagcattaaattccttaatattgccataattttcatatattgagtaaccctggataaaaagtaaacacaccgcagccgtcgctaccacaataaaaaaaattgatagagagttcatttataatctattagaagctgacaaaatttttttacacgcatcagacaatgctttaataaatagttcaacatctacttttgtcatatcgaaccgatggtatgattctaacctagaattacatccgaaaaagttgactatgttcatagtcattaagtcattaacaaacaacattccagactctggattataagacgatactgtttcgtcacaattacctaccttaatcatgtgattatgaatattggctattagagcaccttctaagaaatctataatatctttgaaacacgatttaaaatcaaaccacgaatatacttctacgaagaaagttagtttacccataggagaaataactataaatggagatctaaatacaaaatccggatctatgatagttttaacattattatattctctattaaatacctccacatctaaaaatgttaattttgaaactatgtcttcgtttattaccgtacctgaactaaacgctataagctctattgtttgagaactctttaaacgatattcttgaaatacatgtaacaaagtttcctttaactcggtcggtttatctaccatagttacagaatttgtatccttatctataatataataatcaaaatcgtataaagttatataattatcgcgttcagattgggatcttttcaaatagactaaaaaccccatttctctagtaagtatcttatgtatatgtttgtaaaatatcttcatggtgggaatatgctctaccgcagttagccattcctcattgacagcggtagatgtattagacaaaactattccaatgtttaacaagggccattttacgagattattaaatccttgtttgataaatgtagccaatgagggttcgagttcaacgacgattgaattctcttcccgcggatgctgcatgatgaacgacgggatgttgttcgattgatttggaattctttttcgactttttgtttatattaaatattttaaaatttatagcggatagcaattcatgtaccacggataatgtagacgcgtattgcgcatcgatatctttattattagataaatttatcaataaatgtgagaagtttgcctcgttaaggtcttccatttaaatattatataaacatttgtgtttgtaacttattcgtcttttatggaatagttttttactagtaaagctgcaattacacactttgtccgtaaaacataaatataaacaccagcttttatcaatcgttccaaaaagtcgacggcggacatttttaacatggcatctattttaaatacacttaggtttttggaaaaaacatcattttataattgtaacgattcaataactaaagaaaagattaagattaaacataagggaatgtcatttgtattttataagccaaagcattctaccgttgttaaatacttgtctggaggaggtatatatcatgatgatttggttgtattggggaaggtaacaattaataatctaaagatgatgctattttacatggatttatcatatcatggagtgacaagtagtggagcaatttacaaattgggatcgtctatcgatagactttctctaaataggactattgttacaaaagttaataattatgatgatacattttttgacgacgatgattgatcgctattgcacaattttgtttttgtactttctaatatagtgtttaggttctttttcatatgagaatattgatttactaaaatatctatgtttaacttttgttctatgacgtccttatcggcggtatcggtacatatacgtaattcaccttcacaaaatacggagtcttcgataataatagccaatcgattattggatctagctgtctgtatcatattcaacatgtttaatatatcctttcgtttcccctttacaggcatcgatcgtagcatattttccgcgtctgatatggaaatgttaaaactacaaaaatgcgtaatgttagcccgtcctaatattggtacgtgtctataagtttggcatagtagaataatagacgtgtttaaatgccttccaaagtttaagaattctattagagtattgcattttgatagtttatcgcctacatcatcaaaaataagtaaaaagtgtgctgattttttatgattttgtgcgacagcaatacatttttctatgttacttttagttcgtatcagattatattctagagattcctgactactaacgaaattaatatgatttggccaaatgtatccatcataatctgggttataaacgggtgtaaacaagaatatatgtttatattttttaactagtgtagaaaacagagatagtaaatagatagtttttccagatccagatcctcctgttaaaaccattctaaacggcatttttaataaattttctcttgaaaattgtttttcttggaaacaattcataattatatttacagttactaaattaatttgataataaatcaaaatatggaaaactaaggttgttagtagggaggagaacaaagaaggcacatcgtgatataaataacatttattatcatgatgacaccagaaaacgacgaagagcagacatctgtgttctccgctactgtttacggagacaaaattcagggaaagaataaacgcaaacgcgtgattggtctatgtattagaatatctatggttatttcactactatctatgattaccatgtccgcgtttctcatagtgcgcctaaatcaatgcatgtctgctaacgaggctgctattactgacgccgctgttgccgttgctgctgcatcatctactcatagaaaggttgcgtctagcactacgcaatatgatcacaaagaaagctgtaatggtttatattaccagggttcttgttatatattacattcagactaccagttattctcggatgctaaagcaaattgcactgcggaatcatcaacactacccaataaatccgatgtcttgactacctggctcattgattatgttgaggatacatggggatctgatggtaatccaattacaaaaactacatccgattatcaagattctgatgtatcacaagaagttagaaagtatttttgtgttaaaacaatgaactaatatttatttttgtacattaataaatgaaatcgcttaatagacaaactgtaagtaggtttaagaagttgtcggtgccggccgctataatgatgatactctcaaccattattagtggcataggaacatttctgcattacaaagaagaactgatgcctagtgcttgcgccaatggatggatacaatacgataaacattgttatttagatactaacattaaaatgtctacagataatgcggtttatcagtgtcgtaaattacgagctagattgcctagacctgatactagacatctgagagtattgtttagtattttttataaagattattgggtaagtttaaaaaagaccaatgataaatggttagatattaataatgataaagatatagatattagtaaattaacaaattttaaacaactaaacagtacgacggatgctgaagcgtgttatatatacaagtctggaaaactggttaaaacagtatgtaaaagtactcaatctgtactatgtgttaaaaaattctacaagtgacaacaaaaaatgaattaataataagtcgttaacgtacgccgccatggacgccgcgtttgttattactccaatgggtgtgttgactataacagatacattgtatgatgatctcgatatctcaatcatggactttataggaccatacattataggtaacataaaaactgtccaaatagatgtacgggatataaaatattccgacatgcaaaaatgctactttagctataagggtaaaatagttcctcaggattctaatgatttggctagattcaacatttatagcatttgtgccgcatacagatcaaaaaataccatcatcatagcatgcgactatgatatcatgttagatatagaagataaacatcagccattttatctattcccatctattgatgtttttaacgctacaatcatagaagcgtataacctgtatacagctggagattatcatctaatcatcaatccttcagataatctgaaaatgaaattgtcgtttaattcttcattctgcatatcagacggcaatggatggatcataattgatgggaaatgcaatagtaattttttatcataaaagttgtaaagtaaataataaaacaataaatattgaactagtagtacgtatattgagcaatcagaaatgatgctggtacctcttatcacggtgaccgtagttgcgggaacaatattagtatgttatatattatatatttgtaggaaaaagatacgtactgtctataatgacaataaaattatcatgacaaaattaaaaaagataaagagttctaattccagcaaatctagtaaatcaactgatagcgaatcagactgggaggatcactgtagtgctatggaacaaaacaatgacgtagataatatttctaggaatgagatattggacgatgatagcttcgctggtagtttaatatgggataacgaatccaatgttatggcgcctagcacagaacacatttacgatagtgttgctggaagcacgctgctaataaataatgatcgtaatgaacagactatttatcagaacactacagtagtaattaatgaaacggagactgttgaagtacttaatgaagataccaaacagaatcctaactattcatccaatcctttcgtaaattataataaaaccagtatttgtagcaagtcaaatccgtttattacagaacttaacaataaatttagtgagaataatccgtttagacgagcacatagcgatgattatcttaataagcaagaacaagatcatgaacacgatgatatagaatcatcggtcgtatcattggtgtgattagtttcctttttataaaattgaagtaatatttagtattattgctgccgtcacgttgtacaaatggagatattccctgtattcggcatttctaaaattagcaattttattgctaataatgactgtagatattatatagatacagaacatcaaaaaattatatctgatgagatcaatagacagatggatgaaacggtacttcttaccaacatcttaagcgtagaagttgtaaatgacaatgagatgtaccatcttattcctcatagattatcgacgattatactctgtattagttctgtcggaggatgtgttatctctatagataatgacgtcaatggcaaaaatattctaacctttcccattgatcatgctgtaatcatatccccactgagtaaatgtgtcgtagttagcaagggtcctacaaccatattggttgttaaagcggatatacctagcaaacgattggtaacatcgtttacaaacgacatactatatgtaaacaatctgtcactgattaattatttgccgttgtctgtattcattattagacgagtcaccgactatttggatagacacatatgcgatcagatatttgctaataataagtggtattcccttataaccatcgacgataagcaatatcctattccatcaaactgtataggtatgtcctctgccaagtacataaattctagcatcgagcaagatactttaatccatgtttgtaacctcgagcatccgttcgactcagtatacaaaaaaatgcagtcgtacaattctctacctatcaaggaacaaatattgtacggtagaattgataatataaatatgagcattagtatttctgtggattaatagatttctagtatggggatcattaatcatctctaatctctaaatacctcataaaacgaaaaaaaagctattatcaaatactgtacggaatggattcattctcttctctttttatgaaactctgttgtatatctactgataaaactggaagcaaaaaatctgatagaaagaataagaataagatcaaggattatatggaacacgattattataaaataacaatagttcctggttcctcttccacgtctactagctcgtggtattatacacatgcctagtaatagtctctttgcgttgacggaaagcagactagaaataacaggctaaaatgttcagacaccataatagttcccaacccagataataacagagttccatcaacacattcctttaaactcaatcccaaacccaaaaccgttaaaatgtatccggccaattgatagtagataatgaggtgtacagcgcatgataatttacacagtaaccaaaatgaaaacactttagtaattataagaaatatagacggtaatgtcatcatcaacaatccgataatatgcctgagagtaaacattgatggataaaacaaaaatgctccgcataactctatcatggcaataacacaaccaaacacttgtaaaattcctaaattagtagaaaatacaacgaatatcgatgtataagtgatctcgagaaataataagaataaagtaatgcccgtaaagataaacatcaacattgtttggtaatcattaaaccaattagtatgaagttgaactaatttcacagtagattttattccagtgttatcctcgcatgtataagtacctggtaagatatctttatattccataatcaatgagacatcactatctgataacgaatgaagtctagcactagtatgccatttacttaatattgtcgtcttggaagttttattataagttaaaatatcatggttatccaatttccatctaatatactttgtcggattatctatagtacacggaataatgatggtatcattacatgctgtatactctatggtctttgtagttgttataacaaccaacgtatagaggtatatcaacgatattctaactcttgacattttttatttatttaaaatgatacctttgttatttattttattctattttgctaacggtattgaatggcataagtttgaaacgagtgaagaaataatttctacttacttattagacgacgtattatacacgggtgttaatggggcggtatacacattttcaaataataaactaaacaaaactggtttaactaataataattatataacaacatctataaaagtagaggatgcggataaggatacattagtatgcggaaccaataacggaaatcccaaatgttggaaaatagacggttcagacgacccaaaacatagaggtagaggatacgctccttatcaaaatagcaaagtaacgataatcagtcacaacggatgtgtactatctgacataaacatatcaaaagaaggaattaaacgatggagaagatttgacggaccatgtggttatgatttattcacggcggataacgtaattccaaaagatggtttacgaggagcattcgtcgataaagacggtacttatgacaaagtttacattcttttcactgatactatcggctcaaagagaattgtcaaaattccgtatatagcacaaatgtgcctaaacgacgaaggtggtccatcatcattgtctagtcatagatggtcgacgtttctcaaagtcgaattagaatgtgatatcgacggaagaagttatagacaaattattcattctagaactataaaaacagataatgatacgatactatatgtattcttcgatagtccttattccaagtccgcattatgtacctattctatgaataccattaaacaatctttttctacgtcaaaattggaaggatatacaaagcaattgccgtctccagctcctggtatatgtttaccagctggaaaagttgttccacataccacgtttgaagtcatagaacaatataatgtactagatgatattataaagcctttatctaaccaacctatcttcgaaggaccgtctggtgttaaatggttcgatataaaggagaaggaaaatgaacatcgggaatatagaatatacttcataaaagaaaattctatatattcgttcgatacaaaatctaaacaaactcgtagctcgcaagtcgatgcgcgactattttcagtaatggtaactgcgaaaccgttatttatagcagatatagggataggagtaggaatgccacaaatgaaaaaaatacttaaaatgtaatcttaatcgagtacaccacacgacaatgaacaaacataagacagattatgctggttatgcttgctgcgtaatatgcggtctaattgtcggaattatttttacagcgacactattaaaagttgtagaacgtaaattagttcatacaccattaatagataaaacgataaaagatgcatatattagagaagattgtcctactgactggataagctataataataaatgtatccatttatctactgatcgaaaaacctgggaggaaggacgtaatgcatgcaaagctctaaattcaaattcggatctaattaagatagagactccaaacgagttaagttttttaagaagccttagacgaggctattgggtaggagaatccgaaatattaaaccagacaaccccatataattttatagctaagaatgccacgaagaatggaactaaaaaacggaaatatatttgtagcacaacgaatactcccaaactgcattcgtgttacactatataacaattacactacatttttatcataccactacttcggttagatgttttagaaaaaaataaatatcgccgtaccgttcttgtttttataaaaataacaattaacaattatcaaattttttctttaatattttacgtggttgaccattcttggtggtaaaataatctcttagtgttggaatggaatgctgtttaatgtttccacactcatcgtatattttgacgtatgtagtcacatcgtttacgcaatagtcagactgtagttctatcatgcttcctacatcagaaggaggaacagttttaaagtctcttggttttaatctattaccgttagttttcatgaaatcctttgttttatccacttcacattttaaataaatgtccactatacattcttttgttaattttactagatcgtcatgggtcatagaatttataggttccgtagtccatggatccaaactagcaaacttcgcgtatacggtatcgcgattagtgtatacaccaactgtatgaaaattaagaaaacagtttaataaatcaacagaaatatttaatcctccgtttgatacagatgcgccatatttatggatttcggattcacacgttgtttgtctgaggtgttcgtctagtgttgcttctacgtaaacttcgattcccatatattctttattgtcagaatcgcataccgatttatcatcatacactgtttgaaaactaaatggtatacacatcaaaataataaataataacgagtacattctgcaatattgttatcgtaattggaaaaatagtgttcgagtgagttggattatgtgagtattggattgtatattttattttatattttgtaataagaataaaatgctaatgtcaagtttattccaatagatgtcttattaaaaacatatataataaataacaatggctgaatggcataaaattatcgaggatatctcaaaaaataataagttcgaggatgccgccatcgttgattacaagactacaaagaatgttctagctgctattcctaacagaacatttgccaagattaatccgggtgaaattattcctctcatcactaatcgtaatattctaaaacctcttattggtcagaaatattgtattgtatatactaactctctaatggatgagaacacgtatgctatggagttgcttactgggtacgcccctgtatctccgatcgttatagcgagaactcataccgcacttatatttttgatgggtaagccaacaacatccagacgtgacgtgtatagaacgtgtagagatcacgctacccgtgtacgtgcaactggtaattaaaataaaaagtaatattcatatgtagtgtcaattttaaatgatgatgatgaaatggataatatccatattgacgatgtcaataatgccggtattggcatacagttcatcgatttttagatttcattcagaggatgtggaattatgttatgggcatttgtattttgataggatctataatgtagtaaatataaaatataatccgcatattccatatagatataattttattaatcgcacgttaaccgtagatgaactagacgataatgtcttttttacacatggttattttttaaaacacaaatatggttcacttaatcctagtttgattgtctcattatcaggaaacttaaaatataatgatatacaatgctcagtaaatgtatcgtgtctcattaaaaatttggcaacgagtacatctactatattaacatctaaacataagacttattctctacatcggtccacgtgtattactataataggatacgattctattatatggtataaagatataaatgacaagtataatgacatctatgattttactgcaatatgtatgctaatagcgtctacattgatagtgaccatatacgtgtttaaaaaaataaaaatgaactcttaattatgctatgctattagaaatggataaaatcaaaattacggttgattcaaaaattggtaatgttgttaccatatcgtataacttggaaaagataactattgatgtcacacctaaaaagaaaaaagaaaaggatgtattattagcgcaatcagttgctgtcgaagaggcaaaagatgtcaaggtagaagaaaaaaatattatcgatattgaagatgacgatgatatggatgtagaaagcgcgtaatacgatctataaaaataagtatataaatactttttatttactgtactcttactgtgtagtggtgataccctactcgattatttttttaaaaaaaaaatacttattctgattcttctagccatttccgtgttcgtttgaatgccacatcgacgtcaaagataggggagtagttgaaatctagttctgcattgttggtacgcacctcaaatgtagtgttggatatcttcaacgtatagttgttgagtagtgatggttttctaaatagaattctcttcatatcattcttgcacgcgtacatttttagcatccatcttggaatcctagatccttgttctattcccaatggtttcatcaatagaagattaaacatatcgtacgaacacgatggagagtaatcgtagcaaaagtaagcatttcctttaatctcagatcccggatactggatatattttgcagccaacacgtgcatccatgcaacatttcctacatatacccggctatgcaccgcgtcatcatcgactgtacgatacataatgttaccgtgttgcttacattgctcgtaaaagactttcatcaatttgtctccttctccgtaaattccagtgggtcttaggcaacaagtatacaattttgctccattcatgattacggaattattggctttcataaccagttgctcggccatacgtttactttttgcgtatacatgtcctggtgatatatcataaagggtatgctcatggccgatgaatggatcaccgtgtttattgggtcctattgcttccatgctactagtatagatcaaatacttgattcctaggtccacacaagctgccaaaatagtctgtgttccataatagtttactttcatgatttcattatcggtgtattttccaaatacatccactagagcagccgtatgaataatcagatttaccccatctagcgcttctctcaccttatcaaagtcgtttatatcacattgtatatagtttataaccttaactttcgaggttattggttgtggatcttctacaatatctatgactctgatttcttgaacatcatctgcactaattaacagttttactatatacctgcctagaaatccggcaccaccagtaaccgcgtacacggccattgctgccactcataatatcagactacttattctattttactaaataatggctgtttgtataatagaccacgataatatcagaggagttatttactttgaaccagtccatggaaaagataaagttttaggatcagttattggattaaaatccggaacgtatagtttgataattcatcgttacggagatattagtcaaggatgtgattccataggcagtccagaaatatttatcggtaacatctttgtaaacagatatggtgtagcatatgtttatttagatacagatgtaaatatatttacaattattggaaaggcgttatctatttcaaaaaatgatcagagattagcgtgtggagttattggtatttcttacataaatgaaaagataatacattttcttacaattaacgagaatggcgtttgatatatcagttaatgcgtctaaaacaataaatgcattagtttacttttctactcagcaaaataaattagtcatacgtaatgaagttaatgatacacactacactgtcgaatttgatagggacaaagtagttgacacgtttatttcatataatagacataatgacaccatagaaataagaggggtgcttccagaggaaactaatattggttgcgcggttaatacgccggttagtatgacttacttgtataataagtatagttttaaactgattttagcagaatatataagacacagaaatactatatccggcaatatttattcggcattgatgacactagatgatttggctattaaacagtatggagacattgatctattatttaatgagaaacttaaagtagactccgattcgggactatttgactttgtcaactttgtaaaggatatgatatgttgtgattctagaatagtagtagctctatctagtctagtatctaaacattgggaattgacaaataaaaaatataggtgtatggcattagccgaacatatatctgatagtattccaatatctgagctatctagactacgatacaatctatgtaagtatctacgcgggcacactgagagcatagaggatgaatttgattattttgaagacgatgattcgtctacatgttctgccgtaaccgacagggaaacggatgtataatttttttttatagcgtgaaggatatgataaaaaatataattgttgtatttatcccattccaatcaccttatatgattctgtaacacaataaaggagtcttatagatgtatagaggtcagatactggtttgataaactgtttattccacataagtatgtttgactttatggttagacccgcatactttaacaaatcactgaaaattggagttaggtattgacctctcagaatcagttgccgttctggaacattaaatgtattttttatgatatactccaacgcatttatgtgggcatacaacaagtcattactaatggagtattccaagagttttagttgtctagtatttaacaagagaagagatttcaacagactgtttatgaactcgaatgccgcctcattgtcgcttatattgatgatgtcgaattctcccaatatcatcaccgatgagtagctcatcttgttatcgggatccaagttttctaaagatgtcattaaaccctcgatcatgaatggatttatcatcatcgtttttatgttggacatgagcttagtccgtttgtccacatctatagacgacgatttctgaattatttcatatatccctctctttaactccaggaacttgtcaggatggtctactttaatatgttctcgtctaagagatgaaaatctttggatggttgtacgcgacttttctctaaaggatgacgttgcccaagatcctctcttaaatgaatccatcttatccttggacaagatggacagtctattttccttagatggtttaatatttttgttacccatgatctataaaggtagacctaatcgtctcggatgacctatatatttattttcagttttattatacgcataaattgtaaaaaatatgttaggtttacaaaaatgtctcgtggggcattaatcgtttttgaaggattggacaaatctggaaaaacaacacaatgtatgaacatcatggaatctataccggcaaacacgataaaatatcttaactttcctcagagatccactgtcactggaaagatgatagatgactatctaactcgtaaaaaaacctataatgatcatatagttaatctattattttgtgcaaatagatgggagtttgcatcttttatacaagaacaactagaacagggaattactttaatagttgatagatacgcattttctggagtagcgtatgccgccgctaaaggcgcgtcaatgactctcagtaagagttatgaatctggattgcctaaacccgacttagttatattcttggaatctggtagcaaagaaattaatagaaacgtcggcgaggaaatttatgaagatgttacattccaacaaaaggtattacaagaatataaaaaaatgattgaagaaggagatattcattggcaaattatttcttctgaattcgaggaagatgtaaagaaggagttgattaagaatatagttatagaggctatacacacggttactggaccagtggggcaactgtggatgtaatagtgaaattacattttttataaatagatgttagtacagtgttataaatggatgaagcatattactctggcaacttggaatcagtactcggatacgtgtccgatatgcataccgaactcgcatcaatatctcaattagttattgccaagatagaaactatagataatgatatattaaacaaggacattgtaaattttatcatgtgtagatcaaacttggataatccatttatctctttcctagatactgtatatactattatagatcaagagaactatcagactgagttgattaattcattagacgacaatgaaattatcgattgtatagttaataagtttatgagcttttataaggataacctagaaaatatagtagatgctatcattactctaaaatatataatgaataatccagattttaaaactacgtatgcagaagtactcggttccagaatagccgatatagatattaaacaagtgatacgtaagaatatactacaattgtctaatgatatccgcgaacgatatttgtgaaaatattaaaaaaaaatactttttttattaaatgacgtcgcttcgcgaatttagaaaattatgctgtgatatatatcacgcatcaggatataaagaaaaatctaaattaattagagactttataacagatagggatgataaatatttgatcattaagctattgcttcccggattagacgatagaatttataacatgaacgataaacaaattataaaattatatagtataatatttaaacaatctcaggaagatatgctacaagatttaggatacggatatataggagacactattaggactttcttcaaagagaacacagaaatccgtccacgagataaaagcattttaactttagaagaagtggatagttttttaactacgttatcatccgtaactaaagaatcgcatcaaataaaattattgactgatatcgcatccgtttgtacatgtaatgatttaaaatgtgtagtcatgcttattgataaagatctaaaaattaaagcgggtcctcggtacgtacttaacgctattagtcctaatgcctatgatgtgtttagaaaatctaataacttgaaagagataatagaaaatgcatctaaacaaaatctagactctatatctatttctgttatgactccaattaatcccatgttagcggaatcgtgtgattctgtcaataaggcgtttaaaaaatttccatcaggaatgtttgcggaagtcaaatacgatggtgaaagagtacaagttcataaaaataataacgagtttgccttctttagtagaaacatgaaaccagtactctctcataaagtggattatctcaaagaatacataccgaaagcatttaaaaaagctacgtctatcgtattggattctgaaattgttcttgtagacgaacataatgtaccgctcccgtttggaagtttaggaatacacaaaaagaaagaatataaaaactctaacatgtgtttgttcgtgtttgactgtttgtactttgatggattcgatatgacggacattccattgtacgaacgaagatcttttctcaaagatgttatggttgaaatacccaatagaatagtattctcagagttgacgaatattagtaacgagtctcagttaactgacgtattggatgatgcactaacgagaaaattagaaggattggtcttaaaagatattaatggagtatacgaaccgggaaagagaagatggttaaaaataaagcgagactatttgaacgagggttccatggcagattctgccgatttagtagtactaggtgcttactatggtaaaggagcaaagggtggtatcatggcagtctttctaatgggttgttacgacgatgaatccggtaaatggaagacggttaccaagtgttcaggacacgatgataatacgttaagggagttgcaagaccaattaaagatgattaaaattaacaaggatcccaaaaaaattccagagtggttagtagttaataaaatctatattcccgattttgtagtagaggatccgaaacaatctcagatatgggaaatttcaggagcagagtttacatcttccaagtcccataccgcaaatggaatatccattagatttcctagatttactaggataagagaggataaaacgtggaaagaatctactcatctaaacgatttagtaaacttgactaaatcttaatagttacatacaaactgaaaattaaaataacactatttagttggtggtcgccatggatggtgttattgtatactgtctaaacgcgctagtaaaacatggcgaggaaataaatcatataaaaaatgatttcatgattaaaccatgttgtgaaagagtttgtgaaaaagtcaagaacgttcacattggcggacaatctaaaaacaatacagtgattgcagatttgccatatctggataatgcggtatccgatgtatgcaattcactgtataaaaagaatgtatcaagaatatccagatttgctaatttgataaagatagatgacgatgacaagactcctactggtgtatataattattttaaacctaaagatgccattcctgttattatatccataggaaaggatagagatgtttgtgaactattaatctcatcagacatatcgtgtgcatgcgtggagttaaattcatatcacgtagccattcttcccatggatgtttccttttttaccaaaggaaatgcatcattgattattctcctgtttgatttctctatcgatgcggcacctctcttaagaagtgtaaccgataataatgttattatatctagacaccagcgtatacatgacgagcttccgagttccaattggttcaagttttacataagtataaagtccgactattgttctatattatatatggttgttgatggatctgtgatgcatgcgatagctgataatagaactcacgcaattattagcaaaaatatattagacaatactacgattaacgatgagtgtagatgctgttattttgaaccacagattaggattcttgatagagatgagatgctcaatggatcatcgtgtgatatgaacagacattgtattatgatgaatttacctgatgtaggcgaatttggatctagtatgttggggaaatatgaacctgacatgattaagattgctctttcggtggctggtaatttaataagaaatcgagactacattcccgggagacgaggatatagctactacgtttacggtatagcctctagataatttttttaagcacgaaataaaaaacataattttaaaccaatctatttcatactattttgtgtgatcaccatggacataaagatagatattagtatttctggtgataaatttacggtgactactaggagggaaaatgaagaaagaaaaaaatatctacctctccaaaaagaaaaaactactgatgttatcaaacctgattatcttgagtacgatgacttgttagatagagatgagatgtttactattctagaggaatattttatgtacagaggtctattaggcctcagaataaaatatggacgactctttaacgaaattagaaaattcgacaatgatgcggaagaacaattcggtactatagaagaactcaagcagaaacttagattaaattctgaagagggagcagataactttatagattatataaaggtacaaaaacaggatatcgtcaaacttactgtatacgattgcatatctatgataggattgtgtgcatgcgtggtagatgtttggagaaatgagaaactgttttctagatggaaatattgtttacgagcgattaaactgtttattgatgatcacatgcttgataagataaaatctatactgcagaatagactagtatatgtggaaatgtcatagaaagttaaaagttaatgagagcaaaaatatataaggttgtattccatatttgttatttttttctgtaatagttagaaaaatacattcgatggtctatctatcagattattatgtgttataaggtactttttctcataataaactagagtatgagtaagatagtgtttttcaaaacatataaatctaaaattgatggatgagatatacagctattaatttcgaaaatatattttaatctgataactttaaacatggatttttgatggtggtttaacgttttaaaaaaagattttgttattgtagtatatgataatattaaaagatggatataaagaatttgctgactgcatgtactattttttacattactacattggctacggcagatatacctacttcgtcactgccacacgctccggtaaacggggcatgtgacgagggagaatatcttgataagaggcataatcaatgttgtaatcagtgtccacctggagaatttgccaaggtcagatgtagtggtagtgataacacaaaatgtgaacgctgcccacctcatacatataccgcaatccccaattactctaatggatgtcatcaatgtagaaaatgcccaacaggatcatttgataaggtaaagtgtaccggaacacagaacagtaaatgttcgtgtcttcctggttggtattgcgctactgattcttcacagactgaagattgtcgagattgtataccaaaaaggagatgtccatgcggatactttggtggaatagatgaacaaggaaatcctatttgtaaatcgtgttgtgttggtgaatattgcgactacctacgtaattatagacttgatccatttcctccatgcaaactatctaaatgtaattaattatgattttgatgataatgttaccatacattatatcgctacttggttagtgtattattcagtatgaagacctattaataattacttatcttttgacgatcttgttataattataatataaaaatacttatggcatagtaactcataattgctgacgcgataaattcgtaataatctgttttgttcaaaggaatctacaggcataaaaataaaaatataatttataatatactcttacagcgcgccatcatgaataacagcagtaaattaattgctgttattaatggatttagaaatagtggacgattttgtgatattaatatagttattaatgatgaaaggataaacgctcacagactcatcctatctggagcctccgaatatttttccattctgttttccaataattttatcgattctaatgaatacgaagttaatctaagtcatttagattatcaaagcgtaaacgatttgatcgattacatttatgggatacctttgagcctaactaacgataacgtgaaatatattctttcaaccgctgattttttacaaattggatctgctattacggagtgtgaaaattacatacttaaaaatctttgttctagaaactgtatcgatttctacatatacgctgataaatataataacaagaaaatagaatcagcgtcgtttaacacaatattacaaaatattttgagactcatcaacgatgaaaactttaaatacttaacagaggaatcaatgataaaaattttaagcgatgatatgttaaatataaaaaatgaggatttcgccccactaattctcattaaatggttagagagtactcaacaaccatgcaccgtcgagttacttaaatgcctcagaatatcattgctttccccacaagttataaaatcactttatagtcatcgactggttagttcaatctacgaatgtataacattcttaaacaatatagcattcttggatgaatcatttcctagataccatagcatcgagttgatatctatcggtataagtaattcgcatgataagatttccataaactgctacaatcataaaaaaaatacatgggaaatgatatcttcacgtagatataggtgtagtttcgcagtggccgtcctggataatattatttatatgatgggtggatatgatcagtccccgtatagaagttcaaaggttatagcgtacaatacatgtacaaattcttggatatatgatataccagagctaaaatatcctcgttctaattgtgggggactggctgatgacgaatacatttattgtataggcggcatacgcgatcaggattcatcgttgacatctagtattgatagatggaagccatcaaaaccatattggcagaagtatgctaaaatgcgcgaaccaaaatgtgatatgggggttgcgatgttaaacggattaatatatgttataggtggaatcgttaaaggtgacacgtgtaccgacgcactagagagtttatcagaagatggatggatgaagcatcaacgtcttccaataaaaatgtccaatatgtcgacgattgttcatgatggcaagatttatatatctggaggttacaacaatagtagtgtagttaatgtaatatcgaatttagtccttagctataattcgatatatgatgaatggaccaaattatcatcattaaacattcctagaattaatcccgctctatggtcagcgcataataaattatatgtaggaggaggaatatctgatgatgttcgaactaatacatctgaaacatacgacaaagaaaaagattgttggacattggataatggtcacgtgttaccacgcaattatataatgtataaatgcgaaccgattaaacataaatatccattggaaaaaacacagtacacgaatgattttctaaagtatttggaaagttttataggtagttgatagaacaaaatacataattttgtaaaaataaatcactttttatactaatatgacacgattaccaatacttttgttactaatatcattagtatacgctacaccttttcctcagacatctaaaaaaataggtgatgatgcaactctatcatgtaatcgaaataatacaaatgactacgttgttatgagtgcttggtataaggagcccaattccattattcttttagctgctaaaagcgacgtcttgtattttgataattataccaaggataaaatatcttacgactctccatacgatgatctagttacaactatcacaattaaatcattgactgctagagatgccggtacttatgtatgtgcattctttatgacatcgcctacaaatgacactgataaagtagattatgaagaatactccacagagttgattgtaaatacagatagtgaatcgactatagacataatactatctggatctacacattcaccggaaactagttctgagaaacctgattatatagataattctaattgctcgtcggtattcgaaatcgcgactccggaaccaattactgataatgtagaagatcatacagacaccgtcacatacactagtgatagcattaatacagtaagtgcatcatctggagaatccacaacagacgagactccggaaccaattactgataaagaagatcatacagttacagacactgtctcatacactacagtaagtacatcatctggaattgtcactactaaatcaaccaccgatgatacgtacaatgataatgatacagtaccaccaactactgtaggcggtagtacaacctctattagcaattataaaaccaaggactttgtagaaatatttggtattaccgcattaattatattgtcggccgtggcaatattctgtattacgtattatatatgtaataaacgttcacgtaaatacaaaacagagaacaaagtctagatttttgacttacataaatgtctgggatagtaaaatctatcatattgagcgggccatctggtttaggaaagacagccatagccaaaagactatgggaatatatttggatttgtggtgtcccataccactagatttcctcgtcctatggaacgagaaggtgtcgattaccattacgttaacagagaggccatctggaagggaatagccgccggaaactttctagaacatactgagtttttaggaaatatttacggaacttctaaaactgctgtgaatacagcggctattaataatcgtatttgtgtgatggatctaaacatcgatggcgttagaagtcttaaaaatacgtacctaatgccttactcggtgtatataagacctacctctcttaaaatggttgagaccaagcttcgttgtagaaacactgaagcggatgatgagattcatcgtcgtgtgatgttggcaaaaactgacatggatgaggcaggtgaagccggtctattcgacactattatcattgaagatgatgtgaatttagcatatagtaagttaattcagatactacaggaccgtattagaatgtattttaacactaattagagacttaagacttaaaacttgataattaataatataactcgtttttatatgtggctatttcaacgtctaatgtattagttaaatattaaaacttaccacgtaaaacttaaaatttaaaatgatatttcattgacagatagatcacacattatgaactttcaaggacttgtgttaactgacaattgcaaaaatcaatgggtcgttggaccattaataggaaaaggtggatttggtagtatttatactactaatgacaataattatgtagtaaaaatagagcccaaagctaacggatcattatttaccgaacaggcattttatactagagtacttaaaccatccgttatcgaagaatggaaaaaatctcacaatataaagcacgtaggtcttatcacgtgcaaggcatttggtctatacaaatccattaatgtggaatatcgattcttggtaattaatagattaggtgcagatctagatgcggtgatcagagccaataataatagattaccaaaaaggtcggtgatgttgatcggaatcgaaatcttaaataccatacaatttatgcacgagcaaggatattctcacggagatattaaagcgagtaatatagtcttggatcaaatagataagaataaattatatctagtggattacggattggtttctaaattcatgtctaatggcgaacatgttccatttataagaaatccaaataaaatggataacggtactctagaatttacacctatagattcgcataaaggatacgttgtatctagacgtggagatctagaaacacttggatattgtatgattagatggttgggaggtatcttgccatggactaagatatctgaaacaaagaattgtgcattagtaagtgccacaaaacagaaatatgttaacaatactgcgactttgttaatgaccagtttgcaatatgcacctagagaattgctgcaatatattaccatggtaaactctttgacatattttgaggaacccaattacgacaagtttcggcacatattaatgcagggtgtatattattaagtgtggtgtttggtcgataaaaattaaaaaataacttaatttattattgatctcgtgtgtacaaccgaaatcatggcgatgttttacgcacacgctctcggtgggtacgacgagaatcttcatgcctttcctggaatatcatcgactgttgccaatgatgtcaggaaatattctgttgtgttagtttataataacaagtatgacattgtaaaagacaaatatatgtggtgttacagtcaggtgaacaagagatatattggagcactgctgcctatgtttgagtgcaatgaatatctacaaattggagatccgatccatgatcaagaaggaaatcaaatctctatcatcacatatcgccacaaaaactactatgctctaagcggaatcgggtacgagagtctagacttgtgtttggaaggagtagggattcatcatcacgtacttgaaacaggaaacgctgtatatggaaaagttcaacatgattattctactatcaaagagaaggccaaagaaatgagtacacttagtccaggacctatcatcgattaccacgtctggataggagattgtatctgtcaagttactgctgtggacgtacatggaaaggaaattatgaaaatgagattcaaaaagggtgcggtgcttccgatcccaaatctggtaaaagttaaacttggggagaatgatacagaaaatctttcttctactatatcggcgacaccatcgaggtaaccacctctctggaagacagcgtgaataatgtactcatgaaacgtttggaaactatacgccatatgtggtctgttgtatatgatcattttgatattgtgaatggtaaagaatgctgttatgtgcatacgcatttgtctaatcaaaatcttataccgagtactgtaaaaacaaatttgtacatgaagactatgggatcatgcattcaaatggattccatggaagctctagagtatcttagcgaactgaaggaatcaggtggatggagtcccagaccagaaatgcaggaatttgaatatccagatggagtggaagacactgaatcaattgagagattggtagaggagttcttcaatagatcagaacttcaggctggtgaatcagtcaaatttggtaattctattaatgttaaacatacatctgtttcagctaagcaactaagaacacgtatacggcagcagcttccttctatactctcatcttttaccaacacaaagggtggatatttgttcattggagttgataataatacacacaaagtatttggattcacggtgggttacgactacctcagactgatagagaatgatatagaaaagcatatcaaaagactttgtgttgtgtatttctgtgagaagaaagaggacatcaagtacgcgtgtcgattcatcaaggtatataaacctggggatgaggctacctcgacatacgtgtgcgctatcaaagtggaaagatgctgttgtgctgtgtttgcagattggccagaatcatggtatatggatactaatggtatcaagaagtattctccagatgaatgggtgtcacatataaaattttaattaatgtaatagagaacaaataataaggttgtaatatcatatagacaataactaacaattaattagtaactgttatctcttttttaactaaccaactaactatatacctattaatacatcgtaattatagttcttaacatctattaatcattgattcgcttctttaattttttataaactaacattgttaattgaaaagggataacatgttacagaatataaattatatatggatttttttaaaaaggaaatacttgactggagtatatatttatctcttcattatatagcacgcgtgttttccaatttttccacatcccatataatacaggattataatctcgttcgaacatacgagaaagtggataaaacaatagttgattttttatctaggttgccaaatttattccatattttagaatatggggaaaatattctacatatttattctatggatgatgctaatacgaatattataattttttttctagatagagtattaaatattaataagaacgggtcatttatacacaatctcgggttatcatcatccattaatataaaagaatatgtatatcaattagttaataatgatcatccagataataggataagactaatgcttgaaaatggacgtagaacaagacattttttgtcctatatatcagatacagttaatatctatatatgtattttaataaatcatggattttatatagatgccgaagacagttacggttgtacattattacatagatgtatatatcactataagaaatcagaatcagaatcatacaatgaattaattaagatattgttaaataatggatcagatgtagataaaaaagatacgtacggaaacacaccttttatcctattatgtaaacacgatatcaacaacgtggaattgtttgagatatgtttagagaatgctaatatagactctgtagactttaatagatatacacctcttcattatgtctcatgtcgtaataaatatgattttgtaaagttattaatttctaaaggagcaaatgttaatgcgcgtaataaattcggaactactccattttattgtggaattatacacggtatctcgcttataaaactatatttggaatcagacacagagttagaaatagataatgaacatatagttcgtcatttaataatttttgatgctgttgaatctttagattatctattatccagaggagttattgatattaactatcgtactatatacaacgaaacatctatttacgacgctgtcagttataatgcgtataatacgttggtctatctattaaacaaaaatggtgattttgagacgattactactagtggatgtacatgtatttcggaagcagtcgcaaacaacaacaaaataataatggaagtactattgtctaaacgaccatctttgaaaattatgatacagtctatgatagcaattactaaacataaacagcataatgcagatttattgaaaatgtgtataaaatatactgcgtgtatgaccgattatgatactcttatagatgtacagtcgctacagcaatataaatggtatattttaagatgtttcgatgaaatagatatcatgaagagatgttatataaaaaataaaactgtattccaattagttttttgtatcaaagacattaatactttaatgagatacggtaaacatccttctttcgtgaaatgcactagtctcgacgtatacggaagtcgtgtacgtaatatcatagcatctattagatatcgtcagagattaattagtctattatccaagaagctggatcctggagataaatggtcgtgttttcctaacgaaataaaatataaaatattggaaaactttaacgataacgaactatccacatatctaaaaatcttataaacattattaaaatataaaatctaagtaggataaaatcacactacatcattgtttccttttagtgctcgacagtgtatactatttttaacgctcataaataaaaatgaaaacgatttccgttgttacgttgttatgcgtactacctgctgttgtttattcaacatgtactgtacccactatgaataacgctaaattaacgtctaccgaaacatcgtttaatgataaccagaaagttacgtttacatgtgatcagggatatcattctttggatccaaatgctgtctgtgaaacagataaatggaaatacgaaaatccatgcaaaaaaatgtgcacagtttctgattatgtctctgaactatataataaaccgctatacgaagtgaattccaccatgacactaagttgcaacggcgaaacaaaatattttcgttgcgaagaaaaaaatggaaatacttcttggaatgatactgttacgtgtcctaatgcggaatgtcaacctcttcaattagaacacggatcgtgtcaaccagttaaagaaaaatactcatttggggaatatatgactatcaactgtgatgttggatatgaggttattggtgcttcgtacataagttgtacagctaattcttggaatgttattccatcatgtcaacaaaaatgtgatatgccgtctctatctaacggattaatttccggatctacattttctatcggtggcgttatacatcttagttgtaaaagtggttttacactaacggggtctccatcatccacatgtatcgacggtaaatggaatcccatactcccaatatgtgtacgaactaacgaaaaatttgatccagtggatgatggtcccgacgatgagacagatttgagcaaactctcgaaagacgttgtacaatatgaacaagaaatagaatcgttagaagcaacttatcatataatcatagtggcgttgacaattatgggcgtcatatttttaatctccgttatagtattagtttgttcctgtgacaaaaataatgaccaatataagttccataaattgctaccgtaaatataaatccgttaaaataattaataatttaataacaaacaagtatcaaaagattaaagacttatagctagaatcaattgagatgtcttcttcagtggatgttgatatctacgatgccgttagagcatttttactcaggcactattataacaagagatttattgtgtatggaagaagtaacgccatattacataatatatacaggctatttacaagatgcgccgttataccgttcgatgatatagtacgtactatgccaaatgaatcacgtgttaaacaatgggtgatggatacacttaatggtataatgatgaatgaacgcgatattactgtaagcgttggcaccggaatactattcatggaaatgtttttcgattacaataaaaatagtatcaacaatcaactaatgtatgatataattaatagcgtatctataattctagctaatgagagatatagaagcgcttttaacgacgatggtatatacatccgtagaaatatgattaacaagttgtacggatacgcatctctaactactattggcacgatcgctggaggtgtttgttattatctgttgatgcatctagttagtttgtataaataattatttcaatatactagttaaaattttaagattttaaatgtataaaaaactaataacgtttttatttgtaataggtgcattagcatcctattcgaataatgagtacactccgtttaataaactgagtgtaaaactctatatagatggagtagataatatagaaaattcatatactgatgataataatgaattggtgttaaattttaaagagtacacaatttctattattacagagtcatgcgacgtcggatttgattccatagatatagatgttataaacgactataaaattattgatatgtataccattgactcgtctactattcaacgcagaggtcacacgtgtagaatatctaccaaattatcatgccattatgataagtacccttatattcacaaatatgatggtgatgagcgacaatattctattactgcagagggaaaatgctataaaggaataaaatatgaaataagtatgatcaacgatgatactctattgagaaaacatactcttaaaattggatctacttatatatttgatcgtcatggacatagtaatacatattattcaaaatatgatttttaaaaatttaaaatatattatcacttcagtgacagtagtcaaataacaaacaacaccatgagatatattataattctcgcagttttgttcattaatagtatacatgctaaaataactagttataagtttgaatccgtcaattttgattccaaaattgaatggactggggatggtctatacaatatatcccttaaaaattatggcatcaagacgtggcaaacaatgtatacaaatgtaccagaaggaacatacgacatatccgcatttccaaagaatgatttcgtatctttctgggttaaatttgaacaaggcgattataaagtggaagagtattgtacgggactatgcgtcgaagtaaaaattggaccaccgactgtaacattgactgaatacgacgaccatatcaatttgtacatcgagcatccgtatgctactagaggtagcaaaaagattcctatttacaaacgcggtgacatgtgtgatatctacttgttgtatacggctaacttcacattcggagattctaaagaaccagtaccatatgatatcgatgactacgattgcacgtctacaggttgcagcatagactttgtcacaacagaaaaagtgtgcgtgacagcacagggagccacagaagggtttctcgaaaaaattactccatggagttcgaaagtatgtctgacacctaaaaagagtgtatatacatgcgcaattagatccaaagaagatgttcccaatttcaaggacaaaatggccagagttatcaagagaaaatttaatacacagtctcaatcttatttaactaaatttctcggtagcacatcaaatgatgttaccacttttcttagcatgcttaacttgactaaatattcataactaatttttattaatgatacaaaaacgaaataaaactgcatattatacactggttaacgcccttataggctctaaccattttcaagatgaggtccctgattatagtccttctgttcccctctatcatctactccatgtctattagacgatgtgagaagactgaagaggaaacatggggattgaaaatagggttgtgtataattgccaaagatttctatcccgaaagaactgattgcagtgttcatctcccaactgcaagtgaaggattgataactgaaggcaatggattcagggatatacgaaacaccgataaattataaaaaaagcaatgtgtccgctgtttccgttaataatactattttcgtaactggcggattattcataaataactctaatagcacgatcgtggttaacaatatggaaaaacttgacatttataaagacaaacaatggtcgattatagaaatgcctatggctagggtatatcacggcatcgactcgacatttggaatgttatattttgccggaggtctatccgttaccgaacaatatggtaatttagagaaaaacaacgagatatcttgttacaatcctagaacgaataagtggtttgatatttcatatactatttataagatatccatatcatcattgtgtaaactaaataacgtcttctatgtatttagtaaggacattggatatgtggaaaagtatgatggtgcatggaagttagtacatgatcgtctccccgctataaaggcattatcaacttctccttattgattgaaaatgaaaatataaatagtttttatgtatagcagtattaccctatagttttattgcttactactaacatggatacagatgttacaaatgtagaagatatcataaatgaaatagatagagagaaagaagaaatactaaaaaatgtagaaattgaaaataataaaaacattaacaagaatcatccaagtggatatattagagaagcactcgttattaatactagtagtaatagtgattccattgataaagaagttatagaatgtatctgtcacgatgtaggaatatagatcatatctactaatttttataatcgatacaaaacataaaaaacaactcgttattacatagcaggcatggaatccttcaagtattgttttgataacgatggcaagaaatggattatcggaaatactttatattctggtaattcaatactctataaggtcagaaaaaatttcactagttcgttctacaattacgtaatgaagatagatcacaaatcacacaagccattgttgtctgaaatacgattctatatatctgtattggatcctttgactatcgacaactggacacgggaacgtggtataaagtatttggctattccagatctgtatggaattggagaaaccgatgattatatgttcttcgttataaagaattcgggaagagtattcgccccaaaggatactgaatcagtcttcgaagcatgcgtcactatgataaacacgttagagtttatacactctcaaggatttacccatggaaaaatagaaccgaggaatatactgattagaaataaacgtctttcactaattgactattctagaactaacaaactatacaagagtggaaactcacatatagattacaacgaggacatgataacttcaggaaatatcaattatatgtgtgtagacaatcatcttggagcaacagtttcaagacgaggagatttagaaatgttgggatattgcatgatagaatggttcggtggcaaacttccatggaaaaacgaaagtagtataaaagtaataaaacaaaaaaaagaatataaaaaatttatagctactttctttgaggactgttttcctgaaggaaatgaacctctggaattagttagatatatagaattagtatacacgttagattattctcaaactcctaattatgacagactacgtaaactgtttatacaagattgaaattatattcttttttttatagagtgtggtagtgttacggatatctaatattaatattagactatctctatcgcgctacacgaccaatatcgattactatggatatcttctatgaaaggagagaatgtatttatttctccagcgtcaatctcgtcagtattgacaatactgtattatggagctaatggatccactgctgaacagctatcaaaatatgtagaaacggaggagaacacggataaggttagcgctcagaatatctcattcaaatccatgaataaagtatatgggcgatattctgccgtgtttaaagattcctttttgagaaaaattggcgataagtttcaaactgttgacttcactgattgtcgcactatagatgcaatcaacaagtgtgtagatatctttactgaggggaaaatcaatccactattggatgaaccattgtctcctagcaattagtgccgtatactttaaagcaaaatggttgacgccattcgaaaaggaatttaccagtgattatcccttttacgtatctccgacggaaatggtagacgtaagtatgatgtctatgtacggcaaggcatttaatcacgcatctgtaaaagaatcattcggcaacttttcaatcatagaactgccatatgttggagatactagtatgatggtcattcttccagacaagattgatggattagaatccatagaacaaaatctaacagatacaaattttaagaaatggtgtgactttatggatgctatgtttatagatgttcacattcccaagtttaaggtaacaggctcgtataatctggtggatactctagtaaagtcaggactgacagaggtgttcggttcaactggagattatagcaatatgtgtaatttagatgtgagtgtcgacgctatgatccacaaaacgtatatagatgtcaatgaagagtatacagaagcagctgcagcaacttctgtactagtggcagactgtgcatcaacaattacaaatgagttctgtgcagatcatccgttcatctatgtgattaggcatgttgatggaaaaattcttttcgttggtagatattgctctccgacaactaattgttaaccattttttttaaaaaaaatagaaaaaacatgtggtattagtgcaggtcgttgttcttccaattgcaattggtaagatgacggccaactttagtacccacgtcttttcaccacagcactgtggatgtgacagactgaccagtattgatgacgtcaaacaatgtttgactgaatatatttattggtcgtcctatgcataccgcaacaggcaatgcgctggacaattgtattccacactcctctcttttagagatgatgcggaattagtgttcatcgacattcgcgagctggtaaaaaatatgccgtgggatgatgtcaaagattgtacagaaatcatccgttgttatataccggatgagcaaaaaaccatcagagagatttcggccatcatcggactttgtgcatatgctgctacttactggggaggtgaagaccatcccactagtaacagtctgaacgcattgtttgtgatgcttgagatgctaaattacgtggattataacatcatattccggcgtatgaattgatgagttgtacatcttgacattttctttcttctcttctccctttcttctcttctcccttcctccctcttctccctttcccagaaacaaacttttttacccactataaaataaaatgagtatactacctgttatatttctttctatatttttttattcttcattcgttcagacttttaacgcgtctgaatgtatcgacaaagggcaatattttgcatcattcatggagttagaaaacgagccagtaatcttaccatgtcctcaaataaatacgctatcatccggatataatatattagatattttatgggaaaaacgaggagcggataatgatagaattataccgatagataatggtagcaatatgctaattctgaacccgacacaatcagactctggtatttatatatgcattaccacgaacgaaacctactgtgacatgatgtcgttaaatttgacaatcgtgtctgtctcagaatcaaatatagattttatctcgtatccacaaatagtaaatgagagatctactggcgaaatggtatgtcccaatattaatgcatttattgctagtaacgtaaacgcagatattatatggagcggacatcgacgccttagaaataagagacttaaacaacggacacctggaattattaccatagaagatgttagaaaaaatgatgctggttattatacatgtgttttagaatatatatacggtggcaaaacatataacgtaaccagaattgtaaaattagaggtacgggataaaataataccttctactatgcaattaccagatggcattgtaacttcaataggtagtaatttgactattgcatcgttgagacctcccacaacggatgcagacgtcttttggataagtaatggtatgtattacgaagaagatgatggggacggaaacggtagaataagtgtagcaaataaaatctatatgaccgataagagacgtgttattacatcccggttaaacattaatcctgtcaaggaagaagatgctacaacgtttacgtgtatggcgtttactattcctagcatcagcaaaacagttactgttagtataacgtgaatgtatgttgttacatttccatgtcaattgagtttataagaatttttatacattatcttccaacaaacaattgacgaacgtattgctatgattaactcccacgatactatgcatattattaatcattaacttgcagactatacctagtgctattttgacatactcatgttcttgtgtaattgcggtatctatattattaaagtacgtaaatctagctatagttttattatttaattttagataatataccgtctccttatttttaaaaattgccacatcctttattaaatcatgaatgggaatttctatgtcatcgttagtatattgtgaacaacaagagcagatatctataggaaagggtggaatgcgatacattgatctatgtagttttaaaacacacgcgaactttgaagaatttatataaatcattccatcgatacatccttctatgttgagatgtatatatccaggaattcgtttattaatatcgggaaatgtataaactaaaacattgcccgaaagcggtgcctctatctgcgttatatccgttcttaacttacaaaatgtaaccaatacctttgcatgacttgttttgttcggcaacgttagtttaaacttgacgaatggattaattacaatagcatgatccgcgcatctattaagtttttttactttaacgcccttgtatgtttttacagagactttatctaaatttctagtgcttgtatgtgttataaatataacgggatatagaaccgaatcacctaccttagatacccaattacattttatcagatccagataataaacaaattttgtcgccctaactaattctatattgttatatattttacaattggttatgatatcatgtaataacttggagtctaacgcgcatcgtcgtacgtttatacaattgtgatttagtgtagtatatctacacatgtatttttccgcactatagtattctggactagtgataaaactatcgttatatctatcttcaatgaactcatcgagatattgctctctgtcatattcatacacctgcataaactttctagacatcttacaatccgtgttattttaggatcatatttacatatttacgggtatatcaaagatgttagattagttaatgggaatcgtctataataatgaatattaaacaattatatgaggacttttaccacaaagcatcataaaaatgagtcgtcgtctgatttatgttttaaatatcaaccgcaaatcaactcataaaatacaagagaatgaaatatatacatattttagtcattgcaatatagaccatacttctacagaacttgattttgtagttaaaaactatgatctaaacagacgacaacctgtaactgggtatactgcactacactgctatttgtataataattactttacaaacgatgtactgaagatattattaaatcatggagtggatgtaacgatgaaaaccagtagcggacgtatgcctgtttatatattgcttactagatgttgtaatatttcacatgatgtagtgatagatatgatagacaaagataaaaaccacttattacatagagactattccaacctattactagagtatataaaatctcgttacatgttattaaaggaagaggatatcgatgagaacatagtatccactttattagataagggaatcgatcctaactttaaacaagacggatatacagcgttacattattattatttgtgtctcgcacacgtttataaaccaggtgagtgtagaaaaccgataacgataaaaaaggccaagcgaattatttctttgtttatacaacatggagctaatctaaacgcgttagataattgtggtaatacaccattccatttgtatcttagtattgaaatgtgtaataatattcatatgactaaaatgctgttgacttttaatccgaatttcgaaatatgtaataatcatggattaacgcctatactatgttatataacttccgactacatacaacacgatattcttgttatgttaatacatcactatgaaacaaatgttggagaaatgccgatagatgagcgtcgtatgatcgtattcgagtttatcaaaacatattctacacgtccggcagattcgataacttatttgatgaataggtttaaaaatataaatatttatacccgctatgaaggaaagacattattacacgtagcatgtgaatataataatacacacgtaatagattatcttatacgtatcaacggagatataaatgcgttaaccgacaataacaaacacgctacacaactcattatagataacaaagaaaattccccatataccattaattgtttactgtatatacttagatatattgtagataagaatgtgataagatcgttggtggatcaacttccatctctacctatctttcgtcgcttatcatactagtcatatcctaaatgttgatcatattccaccaaatgattgtgaaagagattgagattaaatcgtctaacaaacaattagtttttatgacattaacatataataaataaattaatcattattgacttaacgatgacgaaagttatcatcatcttaggattcttgattattaatacaaattcattgtctatgaaatgtgaacaaggtgtctcatattataattcacaagaattaaagtgttgtaaactatgtaagccaggaacatattcagatcatcgatgtgataaatacagcgataccatttgtggacattgtccgagtgacacattcacgtcaatatataatcgttctccttggtgtcatagttgtagaggtccatgtggtactaatcgagtagaggtcacaccttgtacacctaccacaaatagaatctgtcattgtgactcgaatagttattgtctccttaaagcttctgatggtaactgtgttacatgtgctcctaaaacaaaatgtggtcgtgggtatggaaagaaaggagaagatgaaatgggtaataccatttgtaagaaatgtcggaagggtacttattcagatattgtatctgactctgatcaatgtaaaccaatgacaagataagacttactcgcatctactggatagacataaaatatcctcctcgtaataatgaaatataaatatacactaattattaatatcaataacaatcgagtattaatatataggtcatttttaaatcccttttgggttccgtcccaaacggcgtttcggtctgcgtcgccgccatggccatgccgagcctctccgcgtgctcctccatcgaggacgacttcaactatggcagctcggtggcgtctgccagcgtgcacatacgaatggcatttctaagaaaagtctacggtatcctttgtctacaatttcttttaacaacggcaacaactgcagtatttttatactttgactgcatgcggacatttatacaagggagtcctgttctaatattggcatcaatgttcggatctataggcttgattttcgcattgactttacacagacataaacatcccctgaatctgtacctgctttgtggatttacactgtcggaatctctaacgctggcctctgttgttactttctatgatgtgcatgtcgttatgcaagctttcatgctgactactgcagcgtttcttgctctgactacatatactctacaatcaaagagagatttcagtaaacttggagcaggattgtttgctgctttgtggattttaattttgtcaggactcttggggatatttgtgcaaaatgagacagtggagctggtcctgtctgcttttggggcccttgtattctgtggattcattatctatgacacgcactcactaatacataagctctcgcctgaagagtatgtgttagcctctatcaatctctacttggatatcatcaatctgttcttgcatctgttgcagcttttggaagtatctaataagaaataaagtttaaaatagaattaataaaaacatataggtcattttttaaacatggattggaaaccaaggtagttagttaatacacacaagatatatttttttcacatcatccacccatgggtaacaccaaggttgttagttaataatatacaagatattttttctcactctgatccatgtaaaccaaggacgagataagacactctcattcctcatccacaacccattaaaaaaatggaaattaaagccctctattagcataaacggctacaggtctaccatcaggttaaccttcgtctaccttcacaatggcctttccttgtgcccagttcagaccctgtcattgccacgctactaaggactccctgaataccgtggccgacgtcagacattgtctgactgaatacatcctgtgggtttctcatagatggacccatagagaaagcgctcatctgttctccgtgtggtctcggaacatattctcacaccgtctcttccgcagataaatgcgaacccgtacccagaaatacctttaactatatcgatgtggaaattaatctgtatcccgtcaacgacacatcgtgtactcggacgaccactaccggtctcagcgaatccatctcaacgtcggaactaactattactatgaatcataaagactgtaatcccgtctttcgtgatggatacttctccgttcttaataaggtagcgacttcaggtttctttacaggagaaaggtgtgcactctgaatttcgagattaaatgcaataacaaagattcttcctccaaacagttaacgaaagcaaagaatgatactatcatgccgcattcggagacagtaactctagtgggcgacatctatatactatatagtaataccaatactcaagactacgaaactgatacaatctcttatcatgtgggtaatgttctcgatgtcgatagccatatgcccggtagttgcgatatacataaactgatcactaattccaaacccacccactttttatagtaagtttttcacccataaataataaatacaataattaatttctcgtaaaagtagaaaatatattctaatttattgcacggtaaggaagtagaatcataaagaacagtactcaatcaatagcaattatgaaacaatatatcgtcctggcatgcatgtgcctggcggcagctgctatgcctgccagtcttcagcaatcatcctcatcctcctcctcgtgtacggaagaagaaaacaaacatcatatgggaatcgatgttattatcaaagtcacaaagcaagaccaaacaccgaccaatgataagatttgccaatccgtaacggaaattacagagtccgagtcagatccagatcccgaggtggaatcagaagatgattccacatcagtcgaggatgtagatcctcctaccacttattactccatcatcggtggaggtctgagaatgaactttggattcaccaaatgtcctcagattaaatccatctcagaatccgctgatggaaacacagtgaatgctagattgtccagcgtgtccccaggacaaggtaaggactcatgaagaagctcttgctatgatcaaagactgtgaggtgtctatcgacatcagatgtagcgaagaagagaaagacagcgacatccagtactcgggtctaacatctctcataagaaagtgagttacgaagatatcatcggttcaacgatcgtcgatacaaaatgtgtcaagaatctagagtttagcgttcgtatcggagacatgtgcaaggaatcatctgaacttgaggtcaaggatggattcaagtatgtcgacggatcggcatctgaaggtgcaaccgatgatacttcactcatcgattcaacaaaactcaaagcgtgtgtctgaatcgataactctattcatctgaaattggatgagtagggttaatcgaacgattcaggcacaccacgaattaaaaaagtgtaccggacactatattccggtttgcaaaacaaaaatgttcttaactacattcacaaaaagttacctctcgcgacttcttctttttctgtctcaatagtgtgatacgattatgacactattcctattcctattcctatttcctttcagagtatcacaaaaatattaaacctctttctgatggtctcataaaaaaagttttacaaaaatatttttattctctttctctctttgatggtctcataaaaaaagttttacaaaaatatttttattctctttctctctttgatggtctcataaaaaaagttttacaaaaatatttttattctctttctctctttgatggtctcataaaaaaagttttacaaaaatatttttattctctttctctctttgatggtctcataaaaaaagttttacaaaaatatttttattctctttctctctttgatggtctcataaaaaaagttttacaaaaatatttttattctctttctctctttgatggtctcataaaaaaagttttacaaaaatatttttattctctttctctctttgatggtctcataaaaaaagttttacaaaaatatttttattctctttctctctttgatggtctcataaaaaaagttttacaaaaatatttttattctctttctctctttgatggtctcataaaaaaagttttacaaaaatatttttattctctttctctctttgatggtctcataaaaaaa

SEQ ID NO: 26 - protein, 6 aa, Artificial Sequence
  silk-like unit
GAGAGS

SEQ ID NO: 27 - protein, 6 aa, Artificial Sequence
  silk-like unit
SGAGAG

SEQ ID NO: 28 - protein, 59 aa, Artificial Sequence
  silk fibroin protein
GAGAGSGAGAGSGAGAGSGAGAGSGAGAGSGAGAGSGAGAGSGAGAGSGAGAGSGAAGY

SEQ ID NO: 29 - protein, 5 aa, Artificial Sequence
  elastin-like unit
GVGVP

SEQ ID NO: 30 - protein, 4 aa, Artificial Sequence
  elastin-like unit
VPGG

SEQ ID NO: 31 - protein, 6 aa, Artificial Sequence
  elastin-like unit
APGVGV

SEQ ID NO: 32 - protein, 5 aa, Artificial Sequence
  elastin-like unit
VPGVG

SEQ ID NO: 33 - protein, 7 aa, Artificial Sequence
  keratin-like unit
AKLKLAE

SEQ ID NO: 34 - protein, 7 aa, Artificial Sequence
  keratin-like unit
AKLELAE

SEQ ID NO: 35 - protein, 5 aa, Artificial Sequence
  variant elastin-like unit
  VARIANT (2)...(2): Xaa=Val, Lys, His, Glu, Arg, Asp, Ser. Trp, Tyr, Phe, Leu, Gln, Asn, Cys, Met
GXGVP

SEQ ID NO: 36 - protein, 5 aa, Artificial Sequence
  variant elastin-like unit
  VARIANT (4)...(4): Xaa= Val, Lys, His, Glu, Arg, Asp, Ser, Trp, Tyr, Phe, Leu, Gln, Asn, Cys, Met
VPGXG

SEQ ID NO: 37 - protein, 5 aa, Artificial Sequence
  elastin-like unit
VPGKG

SEQ ID NO: 38 - protein, 5 aa, Artificial Sequence
  elastin-like unit
GKGVP

SEQ ID NO: 39 - protein, 936 aa, Artificial Sequence
  SELP 0
VPGVGVPGVGVPGVGVPGVGVPGVGVPGVGVPGVGVPGVGGAGAGSGAGAGSVPGVGVPGVGVPGVGVPGVGVPGVGVPGVGVPGVGVPGVGGAGAGSGAGAGSVPGVGVPGVGVPGVGVPGVGVPGVGVPGVGVPGVGVPGVGGAGAGSGAGAGSVPGVGVPGVGVPGVGVPGVGVPGVGVPGVGVPGVGVPGVGGAGAGSGAGAGSVPGVGVPGVGVPGVGVPGVGVPGVGVPGVGVPGVGVPGVGGAGAGSGAGAGSVPGVGVPGVGVPGVGVPGVGVPGVGVPGVGVPGVGVPGVGGAGAGSGAGAGSVPGVGVPGVGVPGVGVPGVGVPGVGVPGVGVPGVGVPGVGGAGAGSGAGAGSVPGVGVPGVGVPGVGVPGVGVPGVGVPGVGVPGVGVPGVGGAGAGSGAGAGSVPGVGVPGVGVPGVGVPGVGVPGVGVPGVGVPGVGVPGVGGAGAGSGAGAGSVPGVGVPGVGVPGVGVPGVGVPGVGVPGVGVPGVGVPGVGGAGAGSGAGAGSVPGVGVPGVGVPGVGVPGVGVPGVGVPGVGVPGVGVPGVGGAGAGSGAGAGSVPGVGVPGVGVPGVGVPGVGVPGVGVPGVGVPGVGVPGVGGAGAGSGAGAGSVPGVGVPGVGVPGVGVPGVGVPGVGVPGVGVPGVGVPGVGGAGAGSGAGAGSVPGVGVPGVGVPGVGVPGVGVPGVGVPGVGVPGVGVPGVGGAGAGSGAGAGSVPGVGVPGVGVPGVGVPGVGVPGVGVPGVGVPGVGVPGVGGAGAGSGAGAGSVPGVGVPGVGVPGVGVPGVGVPGVGVPGVGVPGVGVPGVGGAGAGSGAGAGSVPGVGVPGVGVPGVGVPGVGVPGVGVPGVGVPGVGVPGVGGAGAGSGAGAGSVPGVGVPGVGVPGVGVPGVGVPGVGVPGVGVPGVGVPGVGGAGAGSGAGAGS

SEQ ID NO: 40 - protein, 962 aa, Artificial Sequence
  SELP1
GVGVPGVGVPGVGVPGVGVPGAGAGSGAGAGSGAGAGSGAGAGSGAGAGSGAGAGSGAGAGSGAGAGSGAGAGSGVGVPGVGVPGVGVPGVGVPGAGAGSGAGAGSGAGAGSGAGAGSGAGAGSGAGAGSGAGAGSGAGAGSGAGAGSGVGVPGVGVPGVGVPGVGVPGAGAGSGAGAGSGAGAGSGAGAGSGAGAGSGAGAGSGAGAGSGAGAGSGAGAGSGVGVPGVGVPGVGVPGVGVPGAGAGSGAGAGSGAGAGSGAGAGSGAGAGSGAGAGSGAGAGSGAGAGSGAGAGSGVGVPGVGVPGVGVPGVGVPGAGAGSGAGAGSGAGAGSGAGAGSGAGAGSGAGAGSGAGAGSGAGAGSGAGAGSGVGVPGVGVPGVGVPGVGVPGAGAGSGAGAGSGAGAGSGAGAGSGAGAGSGAGAGSGAGAGSGAGAGSGAGAGSGVGVPGVGVPGVGVPGVGVPGAGAGSGAGAGSGAGAGSGAGAGSGAGAGSGAGAGSGAGAGSGAGAGSGAGAGSGVGVPGVGVPGVGVPGVGVPGAGAGSGAGAGSGAGAGSGAGAGSGAGAGSGAGAGSGAGAGSGAGAGSGAGAGSGVGVPGVGVPGVGVPGVGVPGAGAGSGAGAGSGAGAGSGAGAGSGAGAGSGAGAGSGAGAGSGAGAGSGAGAGSGVGVPGVGVPGVGVPGVGVPGAGAGSGAGAGSGAGAGSGAGAGSGAGAGSGAGAGSGAGAGSGAGAGSGAGAGSGVGVPGVGVPGVGVPGVGVPGAGAGSGAGAGSGAGAGSGAGAGSGAGAGSGAGAGSGAGAGSGAGAGSGAGAGSGVGVPGVGVPGVGVPGVGVPGAGAGSGAGAGSGAGAGSGAGAGSGAGAGSGAGAGSGAGAGSGAGAGSGAGAGSGVGVPGVGVPGVGVPGVGVPGAGAGSGAGAGSGAGAGSGAGAGSGAGAGSGAGAGSGAGAGSGAGAGSGAGAGS

SEQ ID NO: 41 - protein, 768 aa, Artificial Sequence
  SELP8
VPGVGVPGVGVPGVGVPGVGVPGVGVPGVGVPGVGVPGVGGAGAGSGAGAGSGAGAGSGAGAGSVPGVGVPGVGVPGVGVPGVGVPGVGVPGVGVPGVGVPGVGGAGAGSGAGAGSGAGAGSGAGAGSVPGVGVPGVGVPGVGVPGVGVPGVGVPGVGVPGVGVPGVGGAGAGSGAGAGSGAGAGSGAGAGSVPGVGVPGVGVPGVGVPGVGVPGVGVPGVGVPGVGVPGVGGAGAGSGAGAGSGAGAGSGAGAGSVPGVGVPGVGVPGVGVPGVGVPGVGVPGVGVPGVGVPGVGGAGAGSGAGAGSGAGAGSGAGAGSVPGVGVPGVGVPGVGVPGVGVPGVGVPGVGVPGVGVPGVGGAGAGSGAGAGSGAGAGSGAGAGSVPGVGVPGVGVPGVGVPGVGVPGVGVPGVGVPGVGVPGVGGAGAGSGAGAGSGAGAGSGAGAGSVPGVGVPGVGVPGVGVPGVGVPGVGVPGVGVPGVGVPGVGGAGAGSGAGAGSGAGAGSGAGAGSVPGVGVPGVGVPGVGVPGVGVPGVGVPGVGVPGVGVPGVGGAGAGSGAGAGSGAGAGSGAGAGSVPGVGVPGVGVPGVGVPGVGVPGVGVPGVGVPGVGVPGVGGAGAGSGAGAGSGAGAGSGAGAGSVPGVGVPGVGVPGVGVPGVGVPGVGVPGVGVPGVGVPGVGGAGAGSGAGAGSGAGAGSGAGAGSVPGVGVPGVGVPGVGVPGVGVPGVGVPGVGVPGVGVPGVGGAGAGSGAGAGSGAGAGSGAGAGS

SEQ ID NO: 42 - protein, 912 aa, Artificial Sequence
  SELP7
VPGVGVPGVGVPGVGVPGVGVPGVGVPGVGVPGVGVPGVGGAGAGSGAGAGSGAGAGSGAGAGSGAGAGSGAGAGSVPGVGVPGVGVPGVGVPGVGVPGVGVPGVGVPGVGVPGVGGAGAGSGAGAGSGAGAGSGAGAGSGAGAGSGAGAGSVPGVGVPGVGVPGVGVPGVGVPGVGVPGVGVPGVGVPGVGGAGAGSGAGAGSGAGAGSGAGAGSGAGAGSGAGAGSVPGVGVPGVGVPGVGVPGVGVPGVGVPGVGVPGVGVPGVGGAGAGSGAGAGSGAGAGSGAGAGSGAGAGSGAGAGSVPGVGVPGVGVPGVGVPGVGVPGVGVPGVGVPGVGVPGVGGAGAGSGAGAGSGAGAGSGAGAGSGAGAGSGAGAGSVPGVGVPGVGVPGVGVPGVGVPGVGVPGVGVPGVGVPGVGGAGAGSGAGAGSGAGAGSGAGAGSGAGAGSGAGAGSVPGVGVPGVGVPGVGVPGVGVPGVGVPGVGVPGVGVPGVGGAGAGSGAGAGSGAGAGSGAGAGSGAGAGSGAGAGSVPGVGVPGVGVPGVGVPGVGVPGVGVPGVGVPGVGVPGVGGAGAGSGAGAGSGAGAGSGAGAGSGAGAGSGAGAGSVPGVGVPGVGVPGVGVPGVGVPGVGVPGVGVPGVGVPGVGGAGAGSGAGAGSGAGAGSGAGAGSGAGAGSGAGAGSVPGVGVPGVGVPGVGVPGVGVPGVGVPGVGVPGVGVPGVGGAGAGSGAGAGSGAGAGSGAGAGSGAGAGSGAGAGSVPGVGVPGVGVPGVGVPGVGVPGVGVPGVGVPGVGVPGVGGAGAGSGAGAGSGAGAGSGAGAGSGAGAGSGAGAGSVPGVGVPGVGVPGVGVPGVGVPGVGVPGVGVPGVGVPGVGGAGAGSGAGAGSGAGAGSGAGAGSGAGAGSGAGAGS

SEQ ID NO: 43 - protein, 968 aa, Artificial Sequence
  SELP3
VPGVGVPGVGVPGVGVPGVGVPGVGVPGVGVPGVGVPGVGGAGAGSGAGAGSGAGAGSGAGAGSGAGAGSGAGAGSGAGAGSGAGAGSVPGVGVPGVGVPGVGVPGVGVPGVGVPGVGVPGVGVPGVGGAGAGSGAGAGSGAGAGSGAGAGSGAGAGSGAGAGSGAGAGSGAGAGSVPGVGVPGVGVPGVGVPGVGVPGVGVPGVGVPGVGVPGVGGAGAGSGAGAGSGAGAGSGAGAGSGAGAGSGAGAGSGAGAGSGAGAGSVPGVGVPGVGVPGVGVPGVGVPGVGVPGVGVPGVGVPGVGGAGAGSGAGAGSGAGAGSGAGAGSGAGAGSGAGAGSGAGAGSGAGAGSVPGVGVPGVGVPGVGVPGVGVPGVGVPGVGVPGVGVPGVGGAGAGSGAGAGSGAGAGSGAGAGSGAGAGSGAGAGSGAGAGSGAGAGSVPGVGVPGVGVPGVGVPGVGVPGVGVPGVGVPGVGVPGVGGAGAGSGAGAGSGAGAGSGAGAGSGAGAGSGAGAGSGAGAGSGAGAGSVPGVGVPGVGVPGVGVPGVGVPGVGVPGVGVPGVGVPGVGGAGAGSGAGAGSGAGAGSGAGAGSGAGAGSGAGAGSGAGAGSGAGAGSVPGVGVPGVGVPGVGVPGVGVPGVGVPGVGVPGVGVPGVGGAGAGSGAGAGSGAGAGSGAGAGSGAGAGSGAGAGSGAGAGSGAGAGSVPGVGVPGVGVPGVGVPGVGVPGVGVPGVGVPGVGVPGVGGAGAGSGAGAGSGAGAGSGAGAGSGAGAGSGAGAGSGAGAGSGAGAGSVPGVGVPGVGVPGVGVPGVGVPGVGVPGVGVPGVGVPGVGGAGAGSGAGAGSGAGAGSGAGAGSGAGAGSGAGAGSGAGAGSGAGAGSVPGVGVPGVGVPGVGVPGVGVPGVGVPGVGVPGVGVPGVGGAGAGSGAGAGSGAGAGSGAGAGSGAGAGSGAGAGSGAGAGSGAGAGS

SEQ ID NO: 44 - protein, 972 aa, Artificial Sequence
  SELP4
VPGVGVPGVGVPGVGVPGVGVPGVGVPGVGVPGVGVPGVGVPGVGVPGVGVPGVGVPGVGGAGAGSGAGAGSGAGAGSGAGAGSGAGAGSGAGAGSGAGAGSGAGAGSVPGVGVPGVGVPGVGVPGVGVPGVGVPGVGVPGVGVPGVGVPGVGVPGVGVPGVGVPGVGGAGAGSGAGAGSGAGAGSGAGAGSGAGAGSGAGAGSGAGAGSGAGAGSVPGVGVPGVGVPGVGVPGVGVPGVGVPGVGVPGVGVPGVGVPGVGVPGVGVPGVGVPGVGGAGAGSGAGAGSGAGAGSGAGAGSGAGAGSGAGAGSGAGAGSGAGAGSVPGVGVPGVGVPGVGVPGVGVPGVGVPGVGVPGVGVPGVGVPGVGVPGVGVPGVGVPGVGGAGAGSGAGAGSGAGAGSGAGAGSGAGAGSGAGAGSGAGAGSGAGAGSVPGVGVPGVGVPGVGVPGVGVPGVGVPGVGVPGVGVPGVGVPGVGVPGVGVPGVGVPGVGGAGAGSGAGAGSGAGAGSGAGAGSGAGAGSGAGAGSGAGAGSGAGAGSVPGVGVPGVGVPGVGVPGVGVPGVGVPGVGVPGVGVPGVGVPGVGVPGVGVPGVGVPGVGGAGAGSGAGAGSGAGAGSGAGAGSGAGAGSGAGAGSGAGAGSGAGAGSVPGVGVPGVGVPGVGVPGVGVPGVGVPGVGVPGVGVPGVGVPGVGVPGVGVPGVGVPGVGGAGAGSGAGAGSGAGAGSGAGAGSGAGAGSGAGAGSGAGAGSGAGAGSVPGVGVPGVGVPGVGVPGVGVPGVGVPGVGVPGVGVPGVGVPGVGVPGVGVPGVGVPGVGGAGAGSGAGAGSGAGAGSGAGAGSGAGAGSGAGAGSGAGAGSGAGAGSVPGVGVPGVGVPGVGVPGVGVPGVGVPGVGVPGVGVPGVGVPGVGVPGVGVPGVGVPGVGGAGAGSGAGAGSGAGAGSGAGAGSGAGAGSGAGAGSGAGAGSGAGAGS

SEQ ID NO: 45 - protein, 896 aa, Artificial Sequence
  SELP 5
VPGVGVPGVGVPGVGVPGVGVPGVGVPGVGVPGVGVPGVGVPGVGVPGVGVPGVGVPGVGVPGVGVPGVGVPGVGVPGVGGAGAGSGAGAGSGAGAGSGAGAGSGAGAGSGAGAGSGAGAGSGAGAGSVPGVGVPGVGVPGVGVPGVGVPGVGVPGVGVPGVGVPGVGVPGVGVPGVGVPGVGVPGVGVPGVGVPGVGVPGVGVPGVGGAGAGSGAGAGSGAGAGSGAGAGSGAGAGSGAGAGSGAGAGSGAGAGSVPGVGVPGVGVPGVGVPGVGVPGVGVPGVGVPGVGVPGVGVPGVGVPGVGVPGVGVPGVGVPGVGVPGVGVPGVGVPGVGGAGAGSGAGAGSGAGAGSGAGAGSGAGAGSGAGAGSGAGAGSGAGAGSVPGVGVPGVGVPGVGVPGVGVPGVGVPGVGVPGVGVPGVGVPGVGVPGVGVPGVGVPGVGVPGVGVPGVGVPGVGVPGVGGAGAGSGAGAGSGAGAGSGAGAGSGAGAGSGAGAGSGAGAGSGAGAGSVPGVGVPGVGVPGVGVPGVGVPGVGVPGVGVPGVGVPGVGVPGVGVPGVGVPGVGVPGVGVPGVGVPGVGVPGVGVPGVGGAGAGSGAGAGSGAGAGSGAGAGSGAGAGSGAGAGSGAGAGSGAGAGSVPGVGVPGVGVPGVGVPGVGVPGVGVPGVGVPGVGVPGVGVPGVGVPGVGVPGVGVPGVGVPGVGVPGVGVPGVGVPGVGGAGAGSGAGAGSGAGAGSGAGAGSGAGAGSGAGAGSGAGAGSGAGAGSVPGVGVPGVGVPGVGVPGVGVPGVGVPGVGVPGVGVPGVGVPGVGVPGVGVPGVGVPGVGVPGVGVPGVGVPGVGVPGVGGAGAGSGAGAGSGAGAGSGAGAGSGAGAGSGAGAGSGAGAGSGAGAGS

SEQ ID NO: 46 - protein, 1040 aa, Artificial Sequence
  SELP6
VPGVGVPGVGVPGVGVPGVGVPGVGVPGVGVPGVGVPGVGVPGVGVPGVGVPGVGVPGVGVPGVGVPGVGVPGVGVPGVGVPGVGVPGVGVPGVGVPGVGVPGVGVPGVGVPGVGVPGVGVPGVGVPGVGVPGVGVPGVGVPGVGVPGVGVPGVGVPGVGGAGAGSGAGAGSGAGAGSGAGAGSGAGAGSGAGAGSGAGAGSGAGAGSVPGVGVPGVGVPGVGVPGVGVPGVGVPGVGVPGVGVPGVGVPGVGVPGVGVPGVGVPGVGVPGVGVPGVGVPGVGVPGVGVPGVGVPGVGVPGVGVPGVGVPGVGVPGVGVPGVGVPGVGVPGVGVPGVGVPGVGVPGVGVPGVGVPGVGVPGVGVPGVGGAGAGSGAGAGSGAGAGSGAGAGSGAGAGSGAGAGSGAGAGSGAGAGSVPGVGVPGVGVPGVGVPGVGVPGVGVPGVGVPGVGVPGVGVPGVGVPGVGVPGVGVPGVGVPGVGVPGVGVPGVGVPGVGVPGVGVPGVGVPGVGVPGVGVPGVGVPGVGVPGVGVPGVGVPGVGVPGVGVPGVGVPGVGVPGVGVPGVGVPGVGVPGVGGAGAGSGAGAGSGAGAGSGAGAGSGAGAGSGAGAGSGAGAGSGAGAGSVPGVGVPGVGVPGVGVPGVGVPGVGVPGVGVPGVGVPGVGVPGVGVPGVGVPGVGVPGVGVPGVGVPGVGVPGVGVPGVGVPGVGVPGVGVPGVGVPGVGVPGVGVPGVGVPGVGVPGVGVPGVGVPGVGVPGVGVPGVGVPGVGVPGVGVPGVGVPGVGGAGAGSGAGAGSGAGAGSGAGAGSGAGAGSGAGAGSGAGAGSGAGAGSVPGVGVPGVGVPGVGVPGVGVPGVGVPGVGVPGVGVPGVGVPGVGVPGVGVPGVGVPGVGVPGVGVPGVGVPGVGVPGVGVPGVGVPGVGVPGVGVPGVGVPGVGVPGVGVPGVGVPGVGVPGVGVPGVGVPGVGVPGVGVPGVGVPGVGVPGVGVPGVGGAGAGSGAGAGSGAGAGSGAGAGSGAGAGSGAGAGSGAGAGSGAGAGS

SEQ ID NO: 47 - protein, 1002 aa, Artificial Sequence
  SELPF
GAGAGSGAGAGSGAGAGSGAGAGSGAGAGSGAGAGSGAGAGSGAGAGSGAGAGSGAGAGSGAGAGSGAGAGSGAAVTGRGDSPASAAGYGAGAGSGAGAGSGAGAGSGAGAGSGAGAGSGVGVGPGVGVGPGVGVGPGVGVGPGVGVGPGVGVGPGVGVGPGVGVGPGAGAGSGAGAGSGAGAGSGAGAGSGAGAGSGAGAGSGAGAGSGAGAGSGAGAGSGAGAGSGAGAGSGAGAGSGAAVTGRGDSPASAAGYGAGAGSGAGAGSGAGAGSGAGAGSGAGAGSGVGVGPGVGVGPGVGVGPGVGVGPGVGVGPGVGVGPGVGVGPGVGVGPGAGAGSGAGAGSGAGAGSGAGAGSGAGAGSGAGAGSGAGAGSGAGAGSGAGAGSGAGAGSGAGAGSGAGAGSGAAVTGRGDSPASAAGYGAGAGSGAGAGSGAGAGSGAGAGSGAGAGSGVGVGPGVGVGPGVGVGPGVGVGPGVGVGPGVGVGPGVGVGPGVGVGPGAGAGSGAGAGSGAGAGSGAGAGSGAGAGSGAGAGSGAGAGSGAGAGSGAGAGSGAGAGSGAGAGSGAGAGSGAAVTGRGDSPASAAGYGAGAGSGAGAGSGAGAGSGAGAGSGAGAGSGVGVGPGVGVGPGVGVGPGVGVGPGVGVGPGVGVGPGVGVGPGVGVGPGAGAGSGAGAGSGAGAGSGAGAGSGAGAGSGAGAGSGAGAGSGAGAGSGAGAGSGAGAGSGAGAGSGAGAGSGAAVTGRGDSPASAAGYGAGAGSGAGAGSGAGAGSGAGAGSGAGAGSGVGVGPGVGVGPGVGVGPGVGVGPGVGVGPGVGVGPGVGVGPGVGVGPGAGAGSGAGAGSGAGAGSGAGAGSGAGAGSGAGAGSGAGAGSGAGAGSGAGAGSGAGAGSGAGAGSGAGAGSGAAVTGRGDSPASAAGYGAGAGSGAGAGSGAGAGSGAGAGSGAGAGSGVGVGPGVGVGPGVGVGPGVGVGPGVGVGPGVGVGPGVGVGPGVGVGP

SEQ ID NO: 48 - protein, 312 aa, Artificial Sequence
  SELP 0K (SELP27K-6mer repeated sequence)
GAGAGSGAGAGSGVGVPGVGVPGVGVPGVGVPGKGVPGVGVPGVGVPGVGVPGAGAGSGAGAGSGVGVPGVGVPGVGVPGVGVPGKGVPGVGVPGVGVPGVGVPGAGAGSGAGAGSGVGVPGVGVPGVGVPGVGVPGKGVPGVGVPGVGVPGVGVPGAGAGSGAGAGSGVGVPGVGVPGVGVPGVGVPGKGVPGVGVPGVGVPGVGVPGAGAGSGAGAGSGVGVPGVGVPGVGVPGVGVPGKGVPGVGVPGVGVPGVGVPGAGAGSGAGAGSGVGVPGVGVPGVGVPGVGVPGKGVPGVGVPGVGVPGVGVP

SEQ ID NO: 49 - protein, 624 aa, Artificial Sequence
  SELP 0K (SELP 27K, 12-mer)
GAGAGSGAGAGSGVGVPGVGVPGVGVPGVGVPGKGVPGVGVPGVGVPGVGVPGAGAGSGAGAGSGVGVPGVGVPGVGVPGVGVPGKGVPGVGVPGVGVPGVGVPGAGAGSGAGAGSGVGVPGVGVPGVGVPGVGVPGKGVPGVGVPGVGVPGVGVPGAGAGSGAGAGSGVGVPGVGVPGVGVPGVGVPGKGVPGVGVPGVGVPGVGVPGAGAGSGAGAGSGVGVPGVGVPGVGVPGVGVPGKGVPGVGVPGVGVPGVGVPGAGAGSGAGAGSGVGVPGVGVPGVGVPGVGVPGKGVPGVGVPGVGVPGVGVPGAGAGSGAGAGSGVGVPGVGVPGVGVPGVGVPGKGVPGVGVPGVGVPGVGVPGAGAGSGAGAGSGVGVPGVGVPGVGVPGVGVPGKGVPGVGVPGVGVPGVGVPGAGAGSGAGAGSGVGVPGVGVPGVGVPGVGVPGKGVPGVGVPGVGVPGVGVPGAGAGSGAGAGSGVGVPGVGVPGVGVPGVGVPGKGVPGVGVPGVGVPGVGVPGAGAGSGAGAGSGVGVPGVGVPGVGVPGVGVPGKGVPGVGVPGVGVPGVGVPGAGAGSGAGAGSGVGVPGVGVPGVGVPGVGVPGKGVPGVGVPGVGVPGVGVP

SEQ ID NO: 50 - protein, 936 aa, Artificial Sequence
  SELP0K (SELP 27K, 18-mer  repeated sequence)
GAGAGSGAGAGSGVGVPGVGVPGVGVPGVGVPGKGVPGVGVPGVGVPGVGVPGAGAGSGAGAGSGVGVPGVGVPGVGVPGVGVPGKGVPGVGVPGVGVPGVGVPGAGAGSGAGAGSGVGVPGVGVPGVGVPGVGVPGKGVPGVGVPGVGVPGVGVPGAGAGSGAGAGSGVGVPGVGVPGVGVPGVGVPGKGVPGVGVPGVGVPGVGVPGAGAGSGAGAGSGVGVPGVGVPGVGVPGVGVPGKGVPGVGVPGVGVPGVGVPGAGAGSGAGAGSGVGVPGVGVPGVGVPGVGVPGKGVPGVGVPGVGVPGVGVPGAGAGSGAGAGSGVGVPGVGVPGVGVPGVGVPGKGVPGVGVPGVGVPGVGVPGAGAGSGAGAGSGVGVPGVGVPGVGVPGVGVPGKGVPGVGVPGVGVPGVGVPGAGAGSGAGAGSGVGVPGVGVPGVGVPGVGVPGKGVPGVGVPGVGVPGVGVPGAGAGSGAGAGSGVGVPGVGVPGVGVPGVGVPGKGVPGVGVPGVGVPGVGVPGAGAGSGAGAGSGVGVPGVGVPGVGVPGVGVPGKGVPGVGVPGVGVPGVGVPGAGAGSGAGAGSGVGVPGVGVPGVGVPGVGVPGKGVPGVGVPGVGVPGVGVPGAGAGSGAGAGSGVGVPGVGVPGVGVPGVGVPGKGVPGVGVPGVGVPGVGVPGAGAGSGAGAGSGVGVPGVGVPGVGVPGVGVPGKGVPGVGVPGVGVPGVGVPGAGAGSGAGAGSGVGVPGVGVPGVGVPGVGVPGKGVPGVGVPGVGVPGVGVPGAGAGSGAGAGSGVGVPGVGVPGVGVPGVGVPGKGVPGVGVPGVGVPGVGVPGAGAGSGAGAGSGVGVPGVGVPGVGVPGVGVPGKGVPGVGVPGVGVPGVGVPGAGAGSGAGAGSGVGVPGVGVPGVGVPGVGVPGKGVPGVGVPGVGVPGVGVP

SEQ ID NO: 51 - protein, 896 aa, Artificial Sequence
  SELP0K (SELP 27K, 17-mer  repeated sequence)
GAGAGSGAGAGSGVGVPGVGVPGVGVPGVGVPGKGVPGVGVPGVGVPGVGVPGAGAGSGAGAGSGVGVPGVGVPGVGVPGVGVPGKGVPGVGVPGVGVPGVGVPGAGAGSGAGAGSGVGVPGVGVPGVGVPGVGVPGKGVPGVGVPGVGVPGVGVPGAGAGSGAGAGSGVGVPGVGVPGVGVPGVGVPGKGVPGVGVPGVGVPGVGVPGAGAGSGAGAGSGVGVPGVGVPGVGVPGVGVPGKGVPGVGVPGVGVPGVGVPGAGAGSGAGAGSGVGVPGVGVPGVGVPGVGVPGKGVPGVGVPGVGVPGVGVPGAGAGSGAGAGSGVGVPGVGVPGVGVPGVGVPGKGVPGVGVPGVGVPGVGVPGAGAGSGAGAGSGVGVPGVGVPGVGVPGVGVPGKGVPGVGVPGVGVPGVGVPGAGAGSGAGAGSGVGVPGVGVPGVGVPGVGVPGKGVPGVGVPGVGVPGVGVPGAGAGSGAGAGSGVGVPGVGVPGVGVPGVGVPGKGVPGVGVPGVGVPGVGVPGAGAGSGAGAGSGVGVPGVGVPGVGVPGVGVPGKGVPGVGVPGVGVPGVGVPGAGAGSGAGAGSGVGVPGVGVPGVGVPGVGVPGKGVPGVGVPGVGVPGVGVPGAGAGSGAGAGSGVGVPGVGVPGVGVPGVGVPGKGVPGVGVPGVGVPGVGVPGAGAGSGAGAGSGVGVPGVGVPGVGVPGVGVPGKGVPGVGVPGVGVPGVGVPGAGAGSGAGAGSGVGVPGVGVPGVGVPGVGVPGKGVPGVGVPGVGVPGVGVPGAGAGSGAGAGSGVGVPGVGVPGVGVPGVGVPGKGVPGVGVPGVGVPGVGVPGAGAGSGAGAGSGVGVPGVGVPGVGVPGVGVPGKGVPGVGVPGVGVPGVGVPGAGAGSGAGAGS

SEQ ID NO: 52 - protein, 832 aa, Artificial Sequence
  SELP 8K (SELP47K)
GAGAGSGAGAGSGVGVPGVGVPGVGVPGVGVPGKGVPGVGVPGVGVPGVGVPGAGAGSGAGAGSGAGAGSGAGAGSGVGVPGVGVPGVGVPGVGVPGKGVPGVGVPGVGVPGVGVPGAGAGSGAGAGSGAGAGSGAGAGSGVGVPGVGVPGVGVPGVGVPGKGVPGVGVPGVGVPGVGVPGAGAGSGAGAGSGAGAGSGAGAGSGVGVPGVGVPGVGVPGVGVPGKGVPGVGVPGVGVPGVGVPGAGAGSGAGAGSGAGAGSGAGAGSGVGVPGVGVPGVGVPGVGVPGKGVPGVGVPGVGVPGVGVPGAGAGSGAGAGSGAGAGSGAGAGSGVGVPGVGVPGVGVPGVGVPGKGVPGVGVPGVGVPGVGVPGAGAGSGAGAGSGAGAGSGAGAGSGVGVPGVGVPGVGVPGVGVPGKGVPGVGVPGVGVPGVGVPGAGAGSGAGAGSGAGAGSGAGAGSGVGVPGVGVPGVGVPGVGVPGKGVPGVGVPGVGVPGVGVPGAGAGSGAGAGSGAGAGSGAGAGSGVGVPGVGVPGVGVPGVGVPGKGVPGVGVPGVGVPGVGVPGAGAGSGAGAGSGAGAGSGAGAGSGVGVPGVGVPGVGVPGVGVPGKGVPGVGVPGVGVPGVGVPGAGAGSGAGAGSGAGAGSGAGAGSGVGVPGVGVPGVGVPGVGVPGKGVPGVGVPGVGVPGVGVPGAGAGSGAGAGSGAGAGSGAGAGSGVGVPGVGVPGVGVPGVGVPGKGVPGVGVPGVGVPGVGVPGAGAGSGAGAGSGAGAGSGAGAGSGVGVPGVGVPGVGVPGVGVPGKGVPGVGVPGVGVPGVGVPGAGAGSGAGAGS

SEQ ID NO: 53 - protein, 696 aa, Artificial Sequence
  SELP9K
GAGAGSGVGVPGVGVPGVGVPGVGVPGKGVPGVGVPGVGVPGVGVPGAGAGSGAGAGSGAGAGSGVGVPGVGVPGVGVPGVGVPGKGVPGVGVPGVGVPGVGVPGAGAGSGAGAGSGAGAGSGVGVPGVGVPGVGVPGVGVPGKGVPGVGVPGVGVPGVGVPGAGAGSGAGAGSGAGAGSGVGVPGVGVPGVGVPGVGVPGKGVPGVGVPGVGVPGVGVPGAGAGSGAGAGSGAGAGSGVGVPGVGVPGVGVPGVGVPGKGVPGVGVPGVGVPGVGVPGAGAGSGAGAGSGAGAGSGVGVPGVGVPGVGVPGVGVPGKGVPGVGVPGVGVPGVGVPGAGAGSGAGAGSGAGAGSGVGVPGVGVPGVGVPGVGVPGKGVPGVGVPGVGVPGVGVPGAGAGSGAGAGSGAGAGSGVGVPGVGVPGVGVPGVGVPGKGVPGVGVPGVGVPGVGVPGAGAGSGAGAGSGAGAGSGVGVPGVGVPGVGVPGVGVPGKGVPGVGVPGVGVPGVGVPGAGAGSGAGAGSGAGAGSGVGVPGVGVPGVGVPGVGVPGKGVPGVGVPGVGVPGVGVPGAGAGSGAGAGSGAGAGSGVGVPGVGVPGVGVPGVGVPGKGVPGVGVPGVGVPGVGVPGAGAGSGAGAGSGAGAGSGVGVPGVGVPGVGVPGVGVPGKGVPGVGVPGVGVPGVGVPGAGAGSGAGAGS

SEQ ID NO: 54 - protein, 612 aa, Artificial Sequence
  SELP415K-6mer repeated sequence
GVGVPGVGVPGVGVPGVGVPGKGVPGVGVPGVGVPGVGVPGVGVPGVGVPGVGVPGVGVPGVGVPGVGVPGVGVPGVGVPGAGAGSGAGAGSGAGAGSGAGAGSGVGVPGVGVPGVGVPGVGVPGKGVPGVGVPGVGVPGVGVPGVGVPGVGVPGVGVPGVGVPGVGVPGVGVPGVGVPGVGVPGAGAGSGAGAGSGAGAGSGAGAGSGVGVPGVGVPGVGVPGVGVPGKGVPGVGVPGVGVPGVGVPGVGVPGVGVPGVGVPGVGVPGVGVPGVGVPGVGVPGVGVPGAGAGSGAGAGSGAGAGSGAGAGSGVGVPGVGVPGVGVPGVGVPGKGVPGVGVPGVGVPGVGVPGVGVPGVGVPGVGVPGVGVPGVGVPGVGVPGVGVPGVGVPGAGAGSGAGAGSGAGAGSGAGAGSGVGVPGVGVPGVGVPGVGVPGKGVPGVGVPGVGVPGVGVPGVGVPGVGVPGVGVPGVGVPGVGVPGVGVPGVGVPGVGVPGAGAGSGAGAGSGAGAGSGAGAGSGVGVPGVGVPGVGVPGVGVPGKGVPGVGVPGVGVPGVGVPGVGVPGVGVPGVGVPGVGVPGVGVPGVGVPGVGVPGVGVPGAGAGSGAGAGS

SEQ ID NO: 55 - protein, 820 aa, Artificial Sequence
  SELP415K-8mer repeated sequence [(GVGVP)4(GKGVP)(GVGVP)11(GAGAGS)4]7(GVGVP)11GKGVP (GVGVP)4(GAGAGS)2
GVGVPGVGVPGVGVPGVGVPGKGVPGVGVPGVGVPGVGVPGVGVPGVGVPGVGVPGVGVPGVGVPGVGVPGVGVPGVGVPGAGAGSGAGAGSGAGAGSGAGAGSGVGVPGVGVPGVGVPGVGVPGKGVPGVGVPGVGVPGVGVPGVGVPGVGVPGVGVPGVGVPGVGVPGVGVPGVGVPGVGVPGAGAGSGAGAGSGAGAGSGAGAGSGVGVPGVGVPGVGVPGVGVPGKGVPGVGVPGVGVPGVGVPGVGVPGVGVPGVGVPGVGVPGVGVPGVGVPGVGVPGVGVPGAGAGSGAGAGSGAGAGSGAGAGSGVGVPGVGVPGVGVPGVGVPGKGVPGVGVPGVGVPGVGVPGVGVPGVGVPGVGVPGVGVPGVGVPGVGVPGVGVPGVGVPGAGAGSGAGAGSGAGAGSGAGAGSGVGVPGVGVPGVGVPGVGVPGKGVPGVGVPGVGVPGVGVPGVGVPGVGVPGVGVPGVGVPGVGVPGVGVPGVGVPGVGVPGAGAGSGAGAGSGAGAGSGAGAGSGVGVPGVGVPGVGVPGVGVPGKGVPGVGVPGVGVPGVGVPGVGVPGVGVPGVGVPGVGVPGVGVPGVGVPGVGVPGVGVPGAGAGSGAGAGSGAGAGSGAGAGSGVGVPGVGVPGVGVPGVGVPGKGVPGVGVPGVGVPGVGVPGVGVPGVGVPGVGVPGVGVPGVGVPGVGVPGVGVPGVGVPGAGAGSGAGAGSGAGAGSGAGAGSGVGVPGVGVPGVGVPGVGVPGKGVPGVGVPGVGVPGVGVPGVGVPGVGVPGVGVPGVGVPGVGVPGVGVPGVGVPGVGVPGAGAGSGAGAGS

SEQ ID NO: 56 - protein, 1028 aa, Artificial Sequence
  SELP 415K-10mer repeated sequence
GVGVPGVGVPGVGVPGVGVPGKGVPGVGVPGVGVPGVGVPGVGVPGVGVPGVGVPGVGVPGVGVPGVGVPGVGVPGVGVPGAGAGSGAGAGSGAGAGSGAGAGSGVGVPGVGVPGVGVPGVGVPGKGVPGVGVPGVGVPGVGVPGVGVPGVGVPGVGVPGVGVPGVGVPGVGVPGVGVPGVGVPGAGAGSGAGAGSGAGAGSGAGAGSGVGVPGVGVPGVGVPGVGVPGKGVPGVGVPGVGVPGVGVPGVGVPGVGVPGVGVPGVGVPGVGVPGVGVPGVGVPGVGVPGAGAGSGAGAGSGAGAGSGAGAGSGVGVPGVGVPGVGVPGVGVPGKGVPGVGVPGVGVPGVGVPGVGVPGVGVPGVGVPGVGVPGVGVPGVGVPGVGVPGVGVPGAGAGSGAGAGSGAGAGSGAGAGSGVGVPGVGVPGVGVPGVGVPGKGVPGVGVPGVGVPGVGVPGVGVPGVGVPGVGVPGVGVPGVGVPGVGVPGVGVPGVGVPGAGAGSGAGAGSGAGAGSGAGAGSGVGVPGVGVPGVGVPGVGVPGKGVPGVGVPGVGVPGVGVPGVGVPGVGVPGVGVPGVGVPGVGVPGVGVPGVGVPGVGVPGAGAGSGAGAGSGAGAGSGAGAGSGVGVPGVGVPGVGVPGVGVPGKGVPGVGVPGVGVPGVGVPGVGVPGVGVPGVGVPGVGVPGVGVPGVGVPGVGVPGVGVPGAGAGSGAGAGSGAGAGSGAGAGSGVGVPGVGVPGVGVPGVGVPGKGVPGVGVPGVGVPGVGVPGVGVPGVGVPGVGVPGVGVPGVGVPGVGVPGVGVPGVGVPGAGAGSGAGAGSGAGAGSGAGAGSGVGVPGVGVPGVGVPGVGVPGKGVPGVGVPGVGVPGVGVPGVGVPGVGVPGVGVPGVGVPGVGVPGVGVPGVGVPGVGVPGAGAGSGAGAGSGAGAGSGAGAGSGVGVPGVGVPGVGVPGVGVPGKGVPGVGVPGVGVPGVGVPGVGVPGVGVPGVGVPGVGVPGVGVPGVGVPGVGVPGVGVPGAGAGSGAGAGS

SEQ ID NO: 57 - protein, 768 aa, Artificial Sequence
  SELP815K  repeated sequence
GAGSGAGAGSGAGAGSGVGVPGVGVPGVGVPGVGVPGKGVPGVGVPGVGVPGVGVPGVGVPGVGVPGVGVPGVGVPGVGVPGVGVPGVGVPGVGVPGAGAGSGAGAGSGAGAGSGAGAGSGAGAGSGAGAGSGAGAGSGAGAGSGVGVPGVGVPGVGVPGVGVPGKGVPGVGVPGVGVPGVGVPGVGVPGVGVPGVGVPGVGVPGVGVPGVGVPGVGVPGVGVPGAGAGSGAGAGSGAGAGSGAGAGSGAGAGSGAGAGSGAGAGSGAGAGSGVGVPGVGVPGVGVPGVGVPGKGVPGVGVPGVGVPGVGVPGVGVPGVGVPGVGVPGVGVPGVGVPGVGVPGVGVPGVGVPGAGAGSGAGAGSGAGAGSGAGAGSGAGAGSGAGAGSGAGAGSGAGAGSGVGVPGVGVPGVGVPGVGVPGKGVPGVGVPGVGVPGVGVPGVGVPGVGVPGVGVPGVGVPGVGVPGVGVPGVGVPGVGVPGAGAGSGAGAGSGAGAGSGAGAGSGAGAGSGAGAGSGAGAGSGAGAGSGVGVPGVGVPGVGVPGVGVPGKGVPGVGVPGVGVPGVGVPGVGVPGVGVPGVGVPGVGVPGVGVPGVGVPGVGVPGVGVPGAGAGSGAGAGSGAGAGSGAGAGSGAGAGSGAGAGSGAGAGSGAGAGSGVGVPGVGVPGVGVPGVGVPGKGVPGVGVPGVGVPGVGVPGVGVPGVGVPGVGVPGVGVPGVGVPGVGVPGVGVPGVGVPGAGAGSGAGAGSGAGAGSGAGAGSGAGAGSGA

SEQ ID NO: 58 - protein, 33 aa, Artificial Sequence
  head sequence
MDPVVLQRRDWENPGVTQLNRLAAHPPFASDPM

SEQ ID NO: 59 - protein, 21 aa, Artificial Sequence
  tail sequence
GAGAMDPGRYQDLRSHHHHHH

SEQ ID NO: 60 - protein, 19 aa, Artificial Sequence
  tail sequence
GAMDPGRYQDLRSHHHHHH

SEQ ID NO: 61 - protein, 948 aa, Artificial Sequence
  SELP27K
MDPVVLQRRDWENPGVTQLNRLAAHPPFASDPMGAGAGSGAGAGSGVGVPGVGVPGVGVPGVGVPGKGVPGVGVPGVGVPGVGVPGAGAGSGAGAGSGVGVPGVGVPGVGVPGVGVPGKGVPGVGVPGVGVPGVGVPGAGAGSGAGAGSGVGVPGVGVPGVGVPGVGVPGKGVPGVGVPGVGVPGVGVPGAGAGSGAGAGSGVGVPGVGVPGVGVPGVGVPGKGVPGVGVPGVGVPGVGVPGAGAGSGAGAGSGVGVPGVGVPGVGVPGVGVPGKGVPGVGVPGVGVPGVGVPGAGAGSGAGAGSGVGVPGVGVPGVGVPGVGVPGKGVPGVGVPGVGVPGVGVPGAGAGSGAGAGSGVGVPGVGVPGVGVPGVGVPGKGVPGVGVPGVGVPGVGVPGAGAGSGAGAGSGVGVPGVGVPGVGVPGVGVPGKGVPGVGVPGVGVPGVGVPGAGAGSGAGAGSGVGVPGVGVPGVGVPGVGVPGKGVPGVGVPGVGVPGVGVPGAGAGSGAGAGSGVGVPGVGVPGVGVPGVGVPGKGVPGVGVPGVGVPGVGVPGAGAGSGAGAGSGVGVPGVGVPGVGVPGVGVPGKGVPGVGVPGVGVPGVGVPGAGAGSGAGAGSGVGVPGVGVPGVGVPGVGVPGKGVPGVGVPGVGVPGVGVPGAGAGSGAGAGSGVGVPGVGVPGVGVPGVGVPGKGVPGVGVPGVGVPGVGVPGAGAGSGAGAGSGVGVPGVGVPGVGVPGVGVPGKGVPGVGVPGVGVPGVGVPGAGAGSGAGAGSGVGVPGVGVPGVGVPGVGVPGKGVPGVGVPGVGVPGVGVPGAGAGSGAGAGSGVGVPGVGVPGVGVPGVGVPGKGVPGVGVPGVGVPGVGVPGAGAGSGAGAGSGVGVPGVGVPGVGVPGVGVPGKGVPGVGVPGVGVPGVGVPGAGAGSGAGAGSGAMDPGRYQDLRSHHHHHH

SEQ ID NO: 62 - protein, 884 aa, Artificial Sequence
  SELP47K
MDPVVLQRRDWENPGVTQLNRLAAHPPFASDPMGAGAGSGAGAGSGVGVPGVGVPGVGVPGVGVPGKGVPGVGVPGVGVPGVGVPGAGAGSGAGAGSGAGAGSGAGAGSGVGVPGVGVPGVGVPGVGVPGKGVPGVGVPGVGVPGVGVPGAGAGSGAGAGSGAGAGSGAGAGSGVGVPGVGVPGVGVPGVGVPGKGVPGVGVPGVGVPGVGVPGAGAGSGAGAGSGAGAGSGAGAGSGVGVPGVGVPGVGVPGVGVPGKGVPGVGVPGVGVPGVGVPGAGAGSGAGAGSGAGAGSGAGAGSGVGVPGVGVPGVGVPGVGVPGKGVPGVGVPGVGVPGVGVPGAGAGSGAGAGSGAGAGSGAGAGSGVGVPGVGVPGVGVPGVGVPGKGVPGVGVPGVGVPGVGVPGAGAGSGAGAGSGAGAGSGAGAGSGVGVPGVGVPGVGVPGVGVPGKGVPGVGVPGVGVPGVGVPGAGAGSGAGAGSGAGAGSGAGAGSGVGVPGVGVPGVGVPGVGVPGKGVPGVGVPGVGVPGVGVPGAGAGSGAGAGSGAGAGSGAGAGSGVGVPGVGVPGVGVPGVGVPGKGVPGVGVPGVGVPGVGVPGAGAGSGAGAGSGAGAGSGAGAGSGVGVPGVGVPGVGVPGVGVPGKGVPGVGVPGVGVPGVGVPGAGAGSGAGAGSGAGAGSGAGAGSGVGVPGVGVPGVGVPGVGVPGKGVPGVGVPGVGVPGVGVPGAGAGSGAGAGSGAGAGSGAGAGSGVGVPGVGVPGVGVPGVGVPGKGVPGVGVPGVGVPGVGVPGAGAGSGAGAGSGAGAGSGAGAGSGVGVPGVGVPGVGVPGVGVPGKGVPGVGVPGVGVPGVGVPGAGAGSGAGAGSGAMDPGRYQDLRSHHHHHH

SEQ ID NO: 63 - protein, 821 aa, Artificial Sequence
  SELP815K
MDPVVLQRRDWENPGVTQLNRLAAHPPFASDPMGAGSGAGAGSGAGAGSGVGVPGVGVPGVGVPGVGVPGKGVPGVGVPGVGVPGVGVPGVGVPGVGVPGVGVPGVGVPGVGVPGVGVPGVGVPGVGVPGAGAGSGAGAGSGAGAGSGAGAGSGAGAGSGAGAGSGAGAGSGAGAGSGVGVPGVGVPGVGVPGVGVPGKGVPGVGVPGVGVPGVGVPGVGVPGVGVPGVGVPGVGVPGVGVPGVGVPGVGVPGVGVPGAGAGSGAGAGSGAGAGSGAGAGSGAGAGSGAGAGSGAGAGSGAGAGSGVGVPGVGVPGVGVPGVGVPGKGVPGVGVPGVGVPGVGVPGVGVPGVGVPGVGVPGVGVPGVGVPGVGVPGVGVPGVGVPGAGAGSGAGAGSGAGAGSGAGAGSGAGAGSGAGAGSGAGAGSGAGAGSGVGVPGVGVPGVGVPGVGVPGKGVPGVGVPGVGVPGVGVPGVGVPGVGVPGVGVPGVGVPGVGVPGVGVPGVGVPGVGVPGAGAGSGAGAGSGAGAGSGAGAGSGAGAGSGAGAGSGAGAGSGAGAGSGVGVPGVGVPGVGVPGVGVPGKGVPGVGVPGVGVPGVGVPGVGVPGVGVPGVGVPGVGVPGVGVPGVGVPGVGVPGVGVPGAGAGSGAGAGSGAGAGSGAGAGSGAGAGSGAGAGSGAGAGSGAGAGSGVGVPGVGVPGVGVPGVGVPGKGVPGVGVPGVGVPGVGVPGVGVPGVGVPGVGVPGVGVPGVGVPGVGVPGVGVPGVGVPGAGAGSGAGAGSGAGAGSGAGAGSGAGAGSGAGASMDPGRYQDLRSHHHHHH

SEQ ID NO: 64 - DNA, 8 bp, Artificial Sequence
  Sbf1 restriction site sequence
cctgcagg

SEQ ID NO: 65 - DNA, 8 bp, Artificial Sequence
  NotI restriction site sequence
gcggccgc

SEQ ID NO: 66 - DNA, 8 bp, Artificial Sequence
  SgrAI restriction site sequence
crccggyg

SEQ ID NO: 67 - DNA, 6 bp, Artificial Sequence
  SmaI restriction site sequence
cccggg

SEQ ID NO: 68 - DNA, 6 bp, Artificial Sequence
  TspMI restriction site sequence
cccggg

SEQ ID NO: 69 - DNA, 6 bp, Artificial Sequence
  XmaI restriction site sequence
cccggg

SEQ ID NO: 70 - DNA, 6 bp, Artificial Sequence
  ApaI restriction site sequence
cccggg

SEQ ID NO: 71 - DNA, 6 bp, Artificial Sequence
  PspOMI restriction site sequence
cccggg

SEQ ID NO: 72 - protein, 264 aa, Artificial Sequence
  anti-VEGF single chain antibody GLAF-2
METDTLLLWVLLLWVPGSTGDEVQLVESGGGLVQPGGSLRLSCAASGFTISDYWIHWVRQAPGKGLEWVAGITPAGGYTYYADSVKGRFTISADTSKNTAYLQMNSLRAEDTAVYYCARFVFFLPYAMDYWGQGTLVTVSSGGGGSGGGGSGGGGSDIQMTQSPSSLSASVGDRVTITCRASQDVSTAVAWYQQKPGKAPKLLIYSASFLYSGVPSRFSGSGSGTDFTLTISSLQPEDFATYYCQQGYGNPFTFGQGTKVEIKR

SEQ ID NO: 73 - protein, 882 aa, Artificial Sequence
  SELP-27K (15-mer)
GAGAGSGAGAGSGVGVPLGPLGPGVGVPGVGVPGVGVPGKGVPGVGVPGVGVPGVGVPGAGAGSGAGAGSGVGVPLGPLGPGVGVPGVGVPGVGVPGKGVPGVGVPGVGVPGVGVPGAGAGSGAGAGSGVGVPLGPLGPGVGVPGVGVPGVGVPGKGVPGVGVPGVGVPGVGVPGAGAGSGAGAGSGVGVPLGPLGPGVGVPGVGVPGVGVPGKGVPGVGVPGVGVPGVGVPGAGAGSGAGAGSGVGVPLGPLGPGVGVPGVGVPGVGVPGKGVPGVGVPGVGVPGVGVPGAGAGSGAGAGSGVGVPLGPLGPGVGVPGVGVPGVGVPGKGVPGVGVPGVGVPGVGVPGAGAGSGAGAGSGVGVPLGPLGPGVGVPGVGVPGVGVPGKGVPGVGVPGVGVPGVGVPGAGAGSGAGAGSGVGVPLGPLGPGVGVPGVGVPGVGVPGKGVPGVGVPGVGVPGVGVPGAGAGSGAGAGSGVGVPLGPLGPGVGVPGVGVPGVGVPGKGVPGVGVPGVGVPGVGVPGAGAGSGAGAGSGVGVPLGPLGPGVGVPGVGVPGVGVPGKGVPGVGVPGVGVPGVGVPGAGAGSGAGAGSGVGVPLGPLGPGVGVPGVGVPGVGVPGKGVPGVGVPGVGVPGVGVPGAGAGSGAGAGSGVGVPLGPLGPGVGVPGVGVPGVGVPGKGVPGVGVPGVGVPGVGVPGAGAGSGAGAGSGVGVPLGPLGPGVGVPGVGVPGVGVPGKGVPGVGVPGVGVPGVGVPGAGAGSGAGAGSGVGVPLGPLGPGVGVPGVGVPGVGVPGKGVPGVGVPGVGVPGVGVPGAGAGSGAGAGSGVGVPLGPLGPGVGVPGVGVPGVGVPGKGVPGVGVPGVGVPGVGVPGAGAGSGAGAGS

SEQ ID NO: 74 - protein, 912 aa, Artificial Sequence
  SELP-0K-CS2
GAGAGSGAGAGSGVGVPGFFVRARRGVGVPGVGVPGVGVPGKGVPGVGVPGVGVPGVGVPGAGAGSGAGAGSGVGVPGFFVRARRGVGVPGVGVPGVGVPGKGVPGVGVPGVGVPGVGVPGAGAGSGAGAGSGVGVPGFFVRARRGVGVPGVGVPGVGVPGKGVPGVGVPGVGVPGVGVPGAGAGSGAGAGSGVGVPGFFVRARRGVGVPGVGVPGVGVPGKGVPGVGVPGVGVPGVGVPGAGAGSGAGAGSGVGVPGFFVRARRGVGVPGVGVPGVGVPGKGVPGVGVPGVGVPGVGVPGAGAGSGAGAGSGVGVPGFFVRARRGVGVPGVGVPGVGVPGKGVPGVGVPGVGVPGVGVPGAGAGSGAGAGSGVGVPGFFVRARRGVGVPGVGVPGVGVPGKGVPGVGVPGVGVPGVGVPGAGAGSGAGAGSGVGVPGFFVRARRGVGVPGVGVPGVGVPGKGVPGVGVPGVGVPGVGVPGAGAGSGAGAGSGVGVPGFFVRARRGVGVPGVGVPGVGVPGKGVPGVGVPGVGVPGVGVPGAGAGSGAGAGSGVGVPGFFVRARRGVGVPGVGVPGVGVPGKGVPGVGVPGVGVPGVGVPGAGAGSGAGAGSGVGVPGFFVRARRGVGVPGVGVPGVGVPGKGVPGVGVPGVGVPGVGVPGAGAGSGAGAGSGVGVPGFFVRARRGVGVPGVGVPGVGVPGKGVPGVGVPGVGVPGVGVPGAGAGSGAGAGSGVGVPGFFVRARRGVGVPGVGVPGVGVPGKGVPGVGVPGVGVPGVGVPGAGAGSGAGAGSGVGVPGFFVRARRGVGVPGVGVPGVGVPGKGVPGVGVPGVGVPGVGVPGAGAGSGAGAGSGVGVPGFFVRARRGVGVPGVGVPGVGVPGKGVPGVGVPGVGVPGVGVPGAGAGSGAGAGS
